United States Patent Application Publication US 2022/0389077 A1 - sequence listing, part 4

SEQ ID NO: 15528 - protein, 1507 aa, Homo Sapiens
MPRRRPPASGAAQFPERIATRSPDPIPLCTFQRQPRAAPVQPPCRLFFVTFAGCGHRWRSESKPGWISRSRSGIALRAARPPGSSPPRPAAPRPPPPGGVVAEAPGDVVIPRPRVQPMRVARGGPWTPNPAFREAESWSQIGNQRVSEQLLETSLGNEVSDTEPLSPASAGLRRNPALPPGPFAQNFSWGNQENLPPALGKIANGGGTGAGKAECGYETESHLLEPHEIPLNVNTHKFSDCEFPYEFCTVCFSPFKLLGMSGVEGVWNQHSRSASMHTFLNHSATGIREAGCRKDMPVSEMAEDGSEEIMFIWCEDCSQYHDSECPELGPVVMVKDSFVLSRARSWPASGHVHTQAGQGMRGYEDRDRADPQQLPEAVPAGLVRRLSGQQLPCRSTLTWGRLCHLVAQGRSSLPPNLEIRRLEDGAEGVFAITQLVKRTQFGPFESRRVAKWEKESAFPLKVFQKDGHPVCFDTSNEDDCNWMMLVRPAAEAEHQNLTAYQHGSDVYFTTSRDIPPGTELRVWYAAFYAKKMDKPMLKQAGSGVHAAGTPENSAPVESEPSQWACKVCSATFLELQLLNEHLLGHLEQAKSLPPGSQSEAAAPEKEQDTPRGEPPAVPESENVATKEQKKKPRRGRKPKVSKAEQPLVIVEDKEPTEQVAEIITEVPPDEPVSATPDERIMELVLGKLATTTTDTSSVPKFTHHQNNTITLKRSLILSSRHGIRRKLIKQLGEHKRVYQCNICSKIFQNSSNLSRHVRSHGDKLFKCEECAKLFSRKESLKQHVSYKHSRNEVDGEYRYRCGTCEKTFRIESALEFHNCRTDDKTFQCEMCFRFFSTNSNLSKHKKKHGDKKFACEVCSKMFYRKDVMLDHQRRHLEGVRRVKREDLEAGGENLVRYKKEPSGCPVCGKVFSCRSNMNKHLLTHGDKKYTCEICGRKFFRVDVLRDHIHVHFKDIALMDDHQREEFIGKIGISSEENDDNSDESADSEPHKYSCKRCQLTFGRGKEYLKHIMEVHKEKGYGCSICNRRFALKATYHAHMVIHRENLPDPNVQKYIHPCEICGRIFNSIGNLERHKLIHTGVKSHACEQCGKSFARKDMLKEHMRVHDNVREYLCAECGKGMKTKHALRHHMKLHKGIKEYECKECHRRFAQKVNMLKHCKRHTGIKDFMCELCGKTFSERNTMETHKLIHTVGKQWTCSVCDKKYVTEYMLQKHVQLTHDKVEAQSCQLCGTKVSTRASMSRHMRRKHPEVLAVRIDDLDHLPETTTIDASSIGIVQPELTLEQEDLAEGKHGKAAKRSHKRKQKPEEEAGAPVPEDATFSEYSEKETEFTGSVGDETNSAVQSIQQVVVTLGDPNVTTPSSSVGLTNITVTPITTAAATQFTNLQPVAVGHLTTPERQLQLDNSILTVTFDTVSGSAMLHNRQNDVQIHPQPEASNPQSVAHFINLTTLVNSITPLGSQLSDQHPLTWRAVPQTDVLPPSQPQAPPQQAAQPQVQAEQQQQQMYSY

SEQ ID NO: 15529 - protein, 1276 aa, Homo Sapiens
MRSKARARKLAKSDGDVVNNMYEPNRDLLASHSAEDEAEDSAMSPIPVGPPSPFPTSEDFTPKEGSPYEAPVYIPEDIPIPADFELRESSIPGAGLGVWAKRKMEAGERLGPCVVVPRAAAKETDFGWEQILTDVEVSPQEGCITKISEDLGSEKFCVDANQAGAGSWLKYIRVACSCDDQNLTMCQISEQIYYKVIKDIEPGEELLVHVKEGVYPLGTVPPGLDEEPTFRCDECDELFQSKLDLRRHKKYTCGSVGAALYEGLAEELKPEGLGGGSGQAHECKDCERMFPNKYSLEQHMVIHTEEREYKCDQCPKAFNWKSNLIRHQMSHDSGKRFECENCVKVFTDPSNLQRHIRSQHVGARAHACPDCGKTFATSSGLKQHKHIHSTVKPFICEVCHKSYTQFSNLCRHKRMHADCRTQIKCKDCGQMFSTTSSLNKHRRFCEGKNHYTPGGIFAPGLPLTPSPMMDKAKPSPSLNHASLGFNEYFPSRPHPGSLPFSTAPPTFPALTPGFPGIFPPSLYPRPPLLPPTSLLKSPLNHTQDAKLPSPLGNPALPLVSAVSNSSQGTTAAAGPEEKFESRLEDSCVEKLKTRSSDMSDGSDFEDVNTTTGTDLDTTTGTGSDLDSDVDSDPDKDKGKGKSAEGQPKFGGGLAPPGAPNSVAEVPVFYSQHSFFPPPDEQLLTATGAAGDSIKAIASIAEKYFGPGFMGMQEKKLGSLPYHSAFPFQFLPNFPHSLYPFTDRALAHNLLVKAEPKSPRDALKVGGPSAECPFDLTTKPKDVKPILPMPKGPSAPASGEEQPLDLSIGSRARASQNGGGREPRKNHVYGERKLGAGEGLPQVCPARMPQQPPLHYAKPSPFFMDPIYSRVEKRKVTDPVGALKEKYLRPSPLLFHPQMSAIETMTEKLESFAAMKADSGSSLQPLPHHPFNFRSPPPTLSDPILRKGKERYTCRYCGKIFPRSANLTRHLRTHTGEQPYRCKYCDRSFSISSNLQRHVRNIHNKEKPFKCHLCNRCFGQQTNLDRHLKKHEHENAPVSQHPGVLTNHLGTSASSPTSESDNHALLDEKEDSYFSEIRNFIANSEMNQASTRTEKRADMQIVDGSAQCPGLASEKQEDVEEEDDDDLEEDDEDSLAGKSQDDTVSPAPEPQAAYEDEEDEEPAASLAVGFDHTRRCAEDHEGGLLALEPMPTFGKGLDLRRAAEEAFEVKDVLNSTLDSEALKHTLCRQAKNQAYAMMLSLSEDTPLHTPSQGSLDAWLKVTGATSESGAFHPINHL

SEQ ID NO: 15530 - protein, 1718 aa, Homo Sapiens
MNQNTTEPVAATETLAEVPEHVLRGLPEEVRLFPSAVDKTRIGVWATKPILKGKKFGPFVGDKKKRSQVKNNVYMWEVYYPNLGWMCIDATDPEKGNWLRYVNWACSGEEQNLFPLEINRAIYYKTLKPIAPGEELLVWYNGEDNPEIAAAIEEERASARSKRSSPKSRKGKKKSQENKNKGNKIQDIQLKTSEPDFTSANMRDSAEGPKEDEEKPSASALEQPATLQEVASQEVPPELATPAPAWEPQPEPDERLEAAACEVNDLGEEEEEEEEEDEEEEEDDDDDELEDEGEEEASMPNENSVKEPEIRCDEKPEDLLEEPKTTSEETLEDCSEVTPAMQIPRTKEEANGDVFETFMFPCQHCERKFTTKQGLERHMHIHISTVNHAFKCKYCGKAFGTQINRRRHERRHEAGLKRKPSQTLQPSEDLADGKASGENVASKDDSSPPSLGPDCLIMNSEKASQDTINSSVVEENGEVKELHPCKYCKKVFGTHTNMRRHQRRVHERHLIPKGVRRKGGLEEPQPPAEQAQATQNVYVPSTEPEEEGEADDVYIMDISSNISENLNYYIDGKIQTNNNTSNCDVIEMESASADLYGINCLLTPVTVEITQNIKTTQVPVTEDLPKEPLGSTNSEAKKRRTASPPALPKIKAETDSDPMVPSCSLSLPLSISTTEAVSFHKEKSVYLSSKLKQLLQTQDKLTPAGISATEIAKLGPVCVSAPASMLPVTSSRFKRRTSSPPSSPQHSPALRDFGKPSDGKAAWTDAGLTSKKSKLESHSDSPAWSLSGRDERETVSPPCFDEYKMSKEWTASSAFSSVCNQQPLDLSSGVKQKAEGTGKTPVQWESVLDLSVHKKHCSDSEGKEFKESHSVQPTCSAVKKRKPTTCMLQKVLLNEYNGIDLPVENPADGTRSPSPCKSLEAQPDPDLGPGSGFPAPTVESTPDVCPSSPALQTPSLSSGQLPPLLIPTDPSSPPPCPPVLTVATPPPPLLPTVPLPAPSSSASPHPCPSPLSNATAQSPLPILSPTVSPSPSPIPPVEPLMSAASPGPPTLSSSSSSSSSSSSFSSSSSSSSPSPPPLSAISSVVSSGDNLEASLPMISFKQEELENEGLKPREEPQSAAEQDVVVQETFNKNFVCNVCESPFLSIKDLTKHLSIHAEEWPFKCEFCVQLFKDKTDLSEHRFLLHGVGNIFVCSVCKKEFAFLCNLQQHQRDLHPDKVCTHHEFESGTLRPQNFTDPSKAHVEHMQSLPEDPLETSKEEEELNDSSEELYTTIKIMASGIKTKDPDVRLGLNQHYPSFKPPPFQYHHRNPMGIGVTATNFTTHNIPQTFTTAIRCTKCGKGVDNMPELHKHILACASASDKKRYTPKKNPVPLKQTVQPKNGVVVLDNSGKNAFRRMGQPKRLNFSVELSKMSSNKLKLNALKKKNQLVQKAILQKNKSAKQKADLKNACESSSHICPYCNREFTYIGSLNKHAAFSCPKKPLSPPKKKVSHSSKKGGHSSPASSDKNSNSNHRRRTADAEIKMQSMQTPLGKTRARSSGPTQVPLPSSSFRSKQNVKFAASVKSKKPSSSSLRNSSPIRMAKITHVEGKKPKAVAKNHSAQLSSKTSRSLHVRVQKSKAVLQSKSTLASKKRTDRFNIKSRERSGGPVTRSLQLAAAADLSENKREDGSAKQELKDFSYSLRLASRCSPPAAPYITRQYRKVKAPAAAQFQGPFFKE

SEQ ID NO: 15531 - protein, 801 aa, Homo Sapiens
MHHRMNEMNLSPVGMEQLTSSSVSNALPVSGSHLGLAASPTHSAIPAPGLPVAIPNLGPSLSSLPSALSLMLPMGIGDRGVMCGLPERNYTLPPPPYPHLESSYFRTILPGILSYLADRPPPQYIHPNSINVDGNTALSITNNPSALDPYQSNGNVGLEPGIVSIDSRSVNTHGAQSLHPSDGHEVALDTAITMENVSRVTSPISTDGMAEELTMDGVAGEHSQIPNGSRSHEPLSVDSVSNNLAADAVGHGGVIPMHGNGLELPVVMETDHIASRVNGMSDSALSDSIHTVAMSTNSVSVALSTSHNLASLESVSLHEVGLSLEPVAVSSITQEVAMGTGHVDVSSDSLSFVSPSLQMEDSNSNKENMATLFTIWCTLCDRAYPSDCPEHGPVTFVPDTPIESRARLSLPKQLVLRQSIVGAEVGVWTGETIPVRTCFGPLIGQQSHSMEVAEWTDKAVNHIWKIYHNGVLEFCIITTDENECNWMMFVRKARNREEQNLVAYPHDGKIFFCTSQDIPPENELLFYYSRDYAQQIGVPEHPDVHLCNCGKECNSYTEFKAHLTSHIHNHLPTQGHSGSHGPSHSKERKWKCSMCPQAFISPSKLHVHFMGHMGMKPHKCDFCSKAFSDPSNLRTHLKIHTGQKNYRCTLCDKSFTQKAHLESHMVIHTGEKNLKCDYCDKLFMRRQDLKQHVLIHTQERQIKCPKCDKLFLRTNHLKKHLNSHEGKRDYVCEKCTKAYLTKYHLTRHLKTCKGPTSSSSAPEEEEEDDSEEEDLADSVGTEDCRINSAVYSADESLSAHK

SEQ ID NO: 15532 - protein, 630 aa, Homo Sapiens
MLGMYVPDRFSLKSSRVQDGMGLYTARRVRKGEKFGPFAGEKRMPEDLDENMDYRLMWEVRGSKGEVLYILDATNPRHSNWLRFVHEAPSQEQKNLAAIQEGENIFYLAVEDIETDTELLIGYLDSDMEAEEEEQQIMTVIKEGEVENSRRQSTAGRKDRLGCKEDYACPQCESSFTSEDILAEHLQTLHQKPTEEKEFKCKNCGKKFPVKQALQRHVLQCTAKSSLKESSRSFQCSVCNSSFSSASSFEQHQETCRGDARFVCKADSCGKRLKSKDALKRHQENVHTGDPKKKLICSVCNKKCSSASSLQEHRKIHEIFDCQECMKKFISANQLKRHMITHSEKRPYNCEICNKSFKRLDQVGAHKVIHSEDKPYKCKLCGKGFAHRNVYKNHKKTHSEERPFQCEECKALFRTPFSLQRHLLIHNSERTFKCHHCDATFKRKDTLNVHVQVVHERHKKYRCELCNKAFVTPSVLRSHKKTHTGEKEKICPYCGQKFASSGTLRVHIRSHTGERPYQCPYCEKGFSKNDGLKMHIRTHTREKPYKCSECSKAFSQKRGLDEHKRTHTGEKPFQCDVCDLAFSLKKMLIRHKMTHNPNRPLAECQFCHKKFTRNDYLKVHMDNIHGVADS

SEQ ID NO: 15533 - protein, 595 aa, Homo Sapiens
MLKPGDPGGSAFLKVDPAYLQHWQQLFPHGGAGPLKGSGAAGLLSAPQPLQPPPPPPPPERAEPPPDSLRPRPASLSSASSTPASSSTSASSASSCAAAAAAAALAGLSALPVSQLPVFAPLAAAAVAAEPLPPKELCLGATSGPGPVKCGGGGGGGGEGRGAPRFRCSAEELDYYLYGQQRMEIIPLNQHTSDPNNRCDMCADNRNGECPMHGPLHSLRRLVGTSSAAAAAPPPELPEWLRDLPREVCLCTSTVPGLAYGICAAQRIQQGTWIGPFQGVLLPPEKVQAGAVRNTQHLWEIYDQDGTLQHFIDGGEPSKSSWMRYIRCARHCGEQNLTVVQYRSNIFYRACIDIPRGTELLVWYNDSYTSFFGIPLQCIAQDENLNVPSTVMEAMCRQDALQPFNKSSKLAPTTQQRSVVFPQTPCSRNFSLLDKSGPIESGFNQINVKNQRVLASPTSTSQLHSEFSDWHLWKCGQCFKTFTQRILLQMHVCTQNPDRPYQCGHCSQSFSQPSELRNHVVTHSSDRPFKCGYCGRAFAGATTLNNHIRTHTGEKPFKCERCERSFTQATQLSRHQRMPNECKPITESPESIEVD

SEQ ID NO: 15534 - protein, 492 aa, Homo Sapiens
MSPERSQEESPEGDTERTERKPMVKDAFKDISIYFTKEEWAEMGDWEKTRYRNVKMNYNALITVGLRATRPAFMCHRRQAIKLQVDDTEDSDEEWTPRQQVKPPWMAFRGEQSKHQKGMPKASFNNESSLRELSGTPNLLNTSDSEQAQKPVSPPGEASTSGQHSRLKLELRRKETEGKMYSLRERKGHAYKEISEPQDDDYLYCEMCQNFFIDSCAAHGPPTFVKDSAVDKGHPNRSALSLPPGLRIGPSGIPQAGLGVWNEASDLPLGLHFGPYEGRITEDEEAANSGYSWLITKGRNCYEYVDGKDKSSANWMRYVNCARDDEEQNLVAFQYHRQIFYRTCRVIRPGCELLVWSGDEYGQELGIRSSIEPAESLGQAVNCWSGMGMSMARNWASSGAASGRKSSWQGENQSQRSIHVPHAVWPFQVKNFSVNMWNAITPLRTSQDHLQENFSNQRIPAQGIRIRSGNILIHAAVMTKPKVKRSKKGPNS

SEQ ID NO: 15535 - protein, 689 aa, Homo Sapiens
MEDTGIQRGIWDGDAKAVQQCLTDIFTSVYTTCDIPENAIFGPCVLSHTSLYDSIAFIALKSTDKRTVPYIFRVDTSAANGSSEGLMWLRLVQSARDKEEQNLEAYIKNGQLFYRSLRRIAKDEELLVWYGKELTELLLLCPSRSHNKMNGSSPYTCLECSQRFQFEFPYVAHLRFRCPKRLHSADISPQDEQGGGVGTKDHGGGGGGGKDQQQQQQEAPLGPGPKFCKAGPLHHYPSPSPESSNPSAAAGGSSAKPSTDFHNLARELENSRGGSSCSPAQSLSSGSGSGGGGGHQEAELSPDGIATGGGKGKRKFPEEAAEGGGGAGLVGGRGRFVERPLPASKEDLVCTPQQYRASGSYFGLEENGRLFAPPSPETGEAKRSAFVEVKKAARAASLQEEGTADGAGVASEDQDAGGGGGSSTPAAASPVGAEKLLAPRPGGPLPSRLEGGSPARGSAFTSVPQLGSAGSTSGGGGTGAGAAGGAGGGQGAASDERKSAFSQPARSFSQLSPLVLGQKLGALEPCHPADGVGPTRLYPAAADPLAVKLQGAADLNGGCGSLPSGGGGLPKQSPFLYATAFWPKSSAAAAAAAAAAAAGPLQLQLPSALTLLPPSFTSLCLPAQNWCAKCNASFRMTSDLVYHMRSHHKKEYAMEPLVKRRREEKLKCPICNESFRERHHLSRHMTSHN

SEQ ID NO: 15536 - protein, 894 aa, Homo Sapiens
MSPEKSQEESPEEDTERTERKPMVKDAFKDISIYFTKEEWAEMGDWEKTRYRNVKRNYNALITIGLRATRPAFMCHRRQAIKLQVDDTEDSDEEWTPRQQVKPPWMALRVEQRKHQKGMPKASFSNESSLKELSRTANLLNASGSEQAQKPVSPSGEASTSGQHSRLKLELRKKETERKMYSLRERKGHAYKEVSEPQDDDYLYCEMCQNFFIDSCAAHGPPTFVKDSAVDKGHPNRSALSLPPGLRIGPSGIPQAGLGVWNEASDLPLGLHFGPYEGRITEDEEAANNGYSWLITKGRNCYEYVDGKDKSWANWMRYVNCARDDEEQNLVAFQYHRQIFYRTCRVIRPGCELLVWYGDEYGQELGIKWGSKWKKELMAGREPKPEIHPCPSCCLAFSSQKFLSQHVERNHSSQNFPGPSARKLLQPENPCPGDQNQEQQYPDPHSRNDKTKGQEIKERSKLLNKRTWQREISRAFSSPPKGQMGSCRVGKRIMEEESRTGQKVNPGNTGKLFVGVGISRIAKVKYGECGQGFSVKSDVITHQRTHTGEKLYVCRECGRGFSWKSHLLIHQRIHTGEKPYVCRECGRGFSWQSVLLTHQRTHTGEKPYVCRECGRGFSRQSVLLTHQRRHTGEKPYVCRECGRGFSRQSVLLTHQRRHTGEKPYVCRECGRGFSWQSVLLTHQRTHTGEKPYVCRECGRGFSWQSVLLTHQRTHTGEKPYVCRECGRGFSNKSHLLRHQRTHTGEKPYVCRECGRGFRDKSHLLRHQRTHTGEKPYVCRECGRGFRDKSNLLSHQRTHTGEKPYVCRECGRGFSNKSHLLRHQRTHTGEKPYVCRECGRGFRNKSHLLRHQRTHTGEKPYVCRECGRGFSDRSSLCYHQRTHTGEKPYVCREDE

SEQ ID NO: 15537 - protein, 417 aa, Homo Sapiens
MGRRRAPELYRAPFPLYALQVDPSTGLLIAAGGGGAAKTGIKNGVHFLQLELINGRLSASLLHSHDTETRATMNLALAGDILAAGQDAHCQLLRFQAHQQQGNKAEKAGSKEQGPRQRKGAAPAEKKCGAETQHEGLELRVENLQAVQTDFSSDPLQKVVCFNHDNTLLATGGTDGYVRVWKVPSLEKVLEFKAHEGEIEDLALGPDGKLVTVGRDLKASVWQKDQLVTQLHWQENGPTFSSTPYRYQACRFGQVPDQPAGLRLFTVQIPHKRLRQPPPCYLTAWDGSNFLPLRTKSCGHEVVSCLDVSESGTFLGLGTVTGSVAIYIAFSLQCLYYVREAHGIVVTDVAFLPEKGRGPELLGSHETALFSVAVDSRCQLHLLPSRRSVPVWLLLLLCVGLIIVTILLLQSAFPGFL

SEQ ID NO: 15538 - protein, 226 aa, Homo Sapiens
MEAERRRQAEKPKKGRVGSNLLPERHPATGTPTTTVDSSAPPCRRLPGAGGGRSRFSPQGGQRGRPHSRRRHRTTFSPVQLEQLESAFGRNQYPDIWARESLARDTGLSEARIQVWFQNRRAKQRKQERSLLQPLAHLSPAAFSSFLPESTACPYSYAAPPPPVTCFPHPYSHALPSQPSTGGAFALSHQSEDWYPTLHPAPAGHLPCPPPPPMLPLSLEPSKSWN

SEQ ID NO: 15539 - protein, 737 aa, Homo Sapiens
MPDHDSTALLSRQTKRRRVDIGVKRTVGTASAFFAKARATFFSAMNPQGSEQDVEYSVVQHADGEKSNVLRKLLKRANSYEDAMMPFPGATIISQLLKNNMNKNGGTEPSFQASGLSSTGSEVHQEDICSNSSRDSPPECLSPFGRPTMSQFDMDRLCDEHLRAKRARVENIIRGMSHSPSVALRGNENEREMAPQSVSPRESYRENKRKQKLPQQQQQSFQQLVSARKEQKREERRQLKQQLEDMQKQLRQLQEKFYQIYDSTDSENDEDGNLSEDSMRSEILDARAQDSVGRSDNEMCELDPGQFIDRARALIREQEMAENKPKREGNNKERDHGPNSLQPEGKHLAETLKQELNTAMSQVVDTVVKVFSAKPSRQVPQVFPPLQIPQARFAVNGENHNFHTANQRLQCFGDVIIPNPLDTFGNVQMASSTDQTEALPLVVRKNSSDQSASGPAAGGHHQPLHQSPLSATTGFTTSTFRHPFPLPLMAYPFQSPLGAPSGSFSGKDRASPESLDLTRDTTSLRTKMSSHHLSHHPCSPAHPPSTAEGLSLSLIKSECGDLQDMSEISPYSGSAMQEGLSPNHLKKAKLMFFYTRYPSSNMLKTYFSDVKFNRCITSQLIKWFSNFREFYYIQMEKYARQAINDGVTSTEELSITRDCELYRALNMHYNKANDFEVPERFLEVAQITLREFFNAIIAGKDVDPSWKKAIYKVICKLDSEVPEIFKSPNCLQELLHE

SEQ ID NO: 15540 - protein, 592 aa, Homo Sapiens
MDPNSILLSPQPQICSHLAEACTEGERSSSPPELDRDSPFPWSQVPSSSPTDPEWFGDEHIQAKRARVETIVRGMCLSPNPLVPGNAQAGVSPRCPKKARERKRKQNLPTPQGLLMPAPAWDQGNRKGGPRVREQLHLLKQQLRHLQEHILQAAKPRDTAQGPGGCGTGKGPLSAKQGNGCGPRPWVVDGDHQQGTSKDLSGAEKHQESEKPSFLPSGAPASLEILRKELTRAVSQAVDSVLQKVLLDPPGHLTQLGRSFQGQVAEGRSEPSPPVGGACKDPLALAALPRRVQLQAGVPVGNLSLAKRLDSPRYPIPPRMTPKPCQDPPANFPLTAPSHIQENQILSQLLGHRYNNGHWSSSPPQDSSSQRHPSSEPALRPWRTTKPQPLVLSQQQCPLPFTSAHLESLPLLPSVKMEQRGLHAVMEALPFSLLHIQEGLNPGHLKKAKLMFFFTRYPSSNLLKVYFPDVQFNRCITSQMIKWFSNFREFYYIQMEKSARQAISDGVTNPKMLVVLRNSELFQALNMHYNKGNDFEVPDCFLEIASLTLQEFFRAVSAGRDSDPSWKKPIYKIISKLDSDIPEIFKSSSYPQ

SEQ ID NO: 15541 - protein, 245 aa, Homo Sapiens
MTSSYGHVLERQPALGGRLDSPGNLDTLQAKKNFSVSHLLDLEEAGDMVAAQADENVGEAGRSLLESPGLTSGSDTPQQDNDQLNSEEKKKRKQRRNRTTFNSSQLQALERVFERTHYPDAFVREDLARRVNLTEARVQVWFQNRRAKFRRNERAMLANKNASLLKSYSGDVTAVEQPIVPRPAPRPTDYLSWGTASPYSAMATYSATCANNSPAQGINMANSIANLRLKAKEYSLQRNQVPTVN

SEQ ID NO: 15542 - protein, 253 aa, Homo Sapiens
MDSAAAAFALDKPALGPGPPPPPPALGPGDCAQARKNFSVSHLLDLEEVAAAGRLAARPGARAEAREGAAREPSGGSSGSEAAPQDGECPSPGRGSAAKRKKKQRRNRTTFNSSQLQALERVFERTHYPDAFVREELARRVNLSEARVQVWFQNRRAKFRRNERAMLASRSASLLKSYSQEAAIEQPVAPRPTALSPDYLSWTASSPYSTVPPYSPGSSGPATPGVNMANSIASLRLKAKEFSLHHSQVPTVN

SEQ ID NO: 15543 - protein, 523 aa, Homo Sapiens
MMLRGNLKQVRIEKNPARLRALESAVGESEPAAAAAMALALAGEPAPPAPAPPEDHPDEEMGFTIDIKSFLKPGEKTYTQRCRLFVGNLPTDITEEDFKRLFERYGEPSEVFINRDRGFGFIRLESRTLAEIAKAELDGTILKSRPLRIRFATHGAALTVKNLSPVVSNELLEQAFSQFGPVEKAVVVVDDRGRATGKGFVEFAAKPPARKALERCGDGAFLLTTTPRPVIVEPMEQFDDEDGLPEKLMQKTQQYHKEREQPPRFAQPGTFEFEYASRWKALDEMEKQQREQVDRNIREAKEKLEAEMEAARHEHQLMLMRQDLMRRQEELRRLEELRNQELQKRKQIQLRHEEEHRRREEEMIRHREQEELRRQQEGFKPNYMENREQEMRMGDMGPRGAINMGDAFSPAPAGNQGPPPMMGMNMNNRATIPGPPMGPGPAMGPEGAANMGTPMMPDNGAVHNDRFPQGPPSQMGSPMGSRTGSETPQAPMSGVGPVSGGPGGFGRGSQGGNFEGPNKRRRY

SEQ ID NO: 15544 - protein, 328 aa, Homo Sapiens
MDAVLLEHFPGGLDAFPSSYFDEDDFFTDQSSRDPLEDGDELLADEQAEVEFLSHQLHEYCYRDGACLLLQPAPPAAPLALAPPSSGGLGEPDDGGGGGYCCETGAPPGGFPYSPGSPPSCLAYPCAGAAVLSPGARLRGLSGAAAAAARRRRRVRSEAELQQLRQAANVRERRRMQSINDAFEGLRSHIPTLPYEKRLSKVDTLRLAIGYINFLSELVQADLPLRGGGAGGCGGPGGGGRLGGDSPGSQAQKVIICHRGTRSPSPSDPDYGLPPLAGHSLSWTDEKQLKEQNIIRTAKVWTPEDPRKLNSKSSFNNIENEPPFEFVS

SEQ ID NO: 15545 - protein, 322 aa, Homo Sapiens
MADRDSGSEQGGAALGSGGSLGHPGSGSGSGGGGGGGGGGGGSGGGGGGAPGGLQHETQELASKRVDIQNKRFYLDVKQNAKGRFLKIAEVGAGGNKSRLTLSMSVAVEFRDYLGDFIEHYAQLGPSQPPDLAQAQDEPRRALKSEFLVRENRKYYMDLKENQRGRFLRIRQTVNRGPGLGSTQGQTIALPAQGLIEFRDALAKLIDDYGVEEEPAELPEGTSLTVDNKRFFFDVGSNKYGVFMRVSEVKPTYRNSITVPYKVWAKFGHTFCKYSEEMKKIQEKQREKRAACEQLHQQQQQQQEETAAATLLLQGEEEGEED

SEQ ID NO: 15546 - protein, 312 aa, Homo Sapiens
MADGDSGSERGGGGGPCGFQPASRGGGEQETQELASKRLDIQNKRFYLDVKQNAKGRFLKIAEVGAGGSKSRLTLSMAVAAEFRDSLGDFIEHYAQLGPSSPEQLAAGAEEGGGPRRALKSEFLVRENRKYYLDLKENQRGRFLRIRQTVNRGGGGFGAGPGPGGLQSGQTIALPAQGLIEFRDALAKLIDDYGGEDDELAGGPGGGAGGPGGGLYGELPEGTSITVDSKRFFFDVGCNKYGVFLRVSEVKPSYRNAITVPFKAWGKFGGAFCRYADEMKEIQERQRDKLYERRGGGSGGGEESEGEEVDED

SEQ ID NO: 15547 - protein, 347 aa, Homo Sapiens
MERARRRGGGGGRGRGGKNVGGSGLSKSRLYPQAQHSHYPHYAASATPNQAGGAAEIQELASKRVDIQKKRFYLDVKQSSRGRFLKIAEVWIGRGRQDNIRKSKLTLSLSVAAELKDCLGDFIEHYAHLGLKGHRQEHGHSKEQGSRRRQKHSAPSPPVSVGSEEHPHSVLKTDYIERDNRKYYLDLKENQRGRFLRIRQTMMRGTGMIGYFGHSLGQEQTIVLPAQGMIEFRDALVQLIEDYGEGDIEERRGGDDDPLELPEGTSFRVDNKRFYFDVGSNKYGIFLKVSEVRPPYRNTITVPFKAWTRFGENFIKYEEEMRKICNSHKEKRMDGRKASGEEQECLD

SEQ ID NO: 15548 - protein, 462 aa, Homo Sapiens
MASNSSSCPTPGGGHLNGYPVPPYAFFFPPMLGGLSPPGALTTLQHQLPVSGYSTPSPATIETQSSSSEEIVPSPPSPPPLPRIYKPCFVCQDKSSGYHYGVSACEGCKGFFRRSIQKNMVYTCHRDKNCIINKVTRNRCQYCRLQKCFEVGMSKESVRNDRNKKKKEVPKPECSESYTLTPEVGELIEKVRKAHQETFPALCQLGKYTTNNSSEQRVSLDIDLWDKFSELSTKCIIKTVEFAKQLPGFTTLTIADQITLLKAACLDILILRICTRYTPEQDTMTFSDGLTLNRTQMHNAGFGPLTDLVFAFANQLLPLEMDDAETGLLSAICLICGDRQDLEQPDRVDMLQEPLLEALKVYVRKRRPSRPHMFPKMLMKITDLRSISAKGAERVITLKMEIPGSMPPLIQEMLENSEGLDTLSGQPGGGGRDGGGLAPPPGSCSPSLSPSSNRSSPATHSP

SEQ ID NO: 15549 - protein, 455 aa, Homo Sapiens
MTTSGHACPVPAVNGHMTHYPATPYPLLFPPVIGGLSLPPLHGLHGHPPPSGCSTPSPATIETQSTSSEELVPSPPSPLPPPRVYKPCFVCQDKSSGYHYGVSACEGCKGFFRRSIQKNMIYTCHRDKNCVINKVTRNRCQYCRLQKCFEVGMSKESVRNDRNKKKKETSKQECTESYEMTAELDDLTEKIRKAHQETFPSLCQLGKYTTNSSADHRVRLDLGLWDKFSELATKCIIKIVEFAKRLPGFTGLTIADQITLLKAACLDILILRICTRYTPEQDTMTFSDGLTLNRTQMHNAGFGPLTDLVFTFANQLLPLEMDDTETGLLSAICLICGDRQDLEEPTKVDKLQEPLLEALKIYIRKRRPSKPHMFPKILMKITDLRSISAKGAERVITLKMEIPGSMPPLIQEMLENSEGHEPLTPSSSGNTAEHSPSISPSSVENSGVSQSPLVQ

SEQ ID NO: 15550 - protein, 454 aa, Homo Sapiens
MATNKERLFAAGALGPGSGYPGAGFPFAFPGALRGSPPFEMLSPSFRGLGQPDLPKEMASLSVETQSTSSEEMVPSSPSPPPPPRVYKPCFVCNDKSSGYHYGVSSCEGCKGFFRRSIQKNMVYTCHRDKNCIINKVTRNRCQYCRLQKCFEVGMSKEAVRNDRNKKKKEVKEEGSPDSYELSPQLEELITKVSKAHQETFPSLCQLGKYTTNSSADHRVQLDLGLWDKFSELATKCIIKIVEFAKRLPGFTGLSIADQITLLKAACLDILMLRICTRYTPEQDTMTFSDGLTLNRTQMHNAGFGPLTDLVFAFAGQLLPLEMDDTETGLLSAICLICGDRMDLEEPEKVDKLQEPLLEALRLYARRRRPSQPYMFPRMLMKITDLRGISTKGAERAITLKMEIPGPMPPLIREMLENPEMFEDDSSQPGPHPNASSEDEVPGGQGKGGLKSPA

SEQ ID NO: 15551 - protein, 313 aa, Homo Sapiens
MSQSRHRAEAPPLEREDSGTFSLGKMITAKPGKTPIQVLHEYGMKTKNIPVYECERSDVQIHVPTFTFRVTVGDITCTGEGTSKKLAKHRAAEAAINILKANASICFAVPDPLMPDPSKQPKNQLNPIGSLQELAIHHGWRLPEYTLSQEGGPAHKREYTTICRLESFMETGKGASKKQAKRNAAEKFLAKFSNISPENHISLTNVVGHSLGCTWHSLRNSPGEKINLLKRSLLSIPNTDYIQLLSEIAKEQGFNITYLDIDELSANGQYQCLAELSTSPITVCHGSGISCGNAQSDAAHNALQYLKIIAERK

SEQ ID NO: 15552 - protein, 346 aa, Homo Sapiens
MHLPGCAPAMADGSFSLAGHLLRSPGGSTSRLHSIEAILGFTKDDGILGTFPAERGARGAKERDRRLGARPACPKAPEEGSEPSPPPAPAPAPEYEAPRPYCPKEPGEARPSPGLPVGPATGEAKLSEEEQPKKKHRRNRTTFTTYQLHELERAFEKSHYPDVYSREELAGKVNLPEVRVQVWFQNRRAKWRRQEKLEVSSMKLQDSPLLSFSRSPPSATLSPLGAGPGSGGGPAGGALPLESWLGPPLPGGGATALQSLPGFGPPAQSLPASYTPPPPPPPFLNSPPLGPGLQPLAPPPPSYPCGPGFGDKFPLDEADPRNSSIAALRLKAKEHIQAIGKPWQAL

SEQ ID NO: 15553 - protein, 184 aa, Homo Sapiens
MFLSPGEGPATEGGGLGPGEEAPKKKHRRNRTTFTTYQLHQLERAFEASHYPDVYSREELAAKVHLPEVRVQVWFQNRRAKWRRQERLESGSGAVAAPRLPEAPALPFARPPAMSLPLEPWLGPGPPAVPGLPRLLGPGPGLQASFGPHAFAPTFADGFALEEASLRLLAKEHAQALDRAWPPA

SEQ ID NO: 15554 - protein, 714 aa, Homo Sapiens
MNTLQGPVSFKDVAVDFTQEEWQQLDPDEKITYRDVMLENYSHLVSVGYDTTKPNVIIKLEQGEEPWIMGGEFPCQHSPEAWRVDDLIERIQENEDKHSRQAACINSKTLTEEKENTFSQIYMETSLVPSSIIAHNCVSCGKNLESISQLISSDGSYARTKPDECNECGKTYHGEKMCEFNQNGDTYSHNEENILQKISILEKPFEYNECMEALDNEAVFIAHKRAYIGEKPYEWNDSGPDFIQMSNFNAYQRSQMEMKPFECSECGKSFCKKSKFIIHQRAHTGEKPYECNVCGKSFSQKGTLTVHRRSHLEEKPYKCNECGKTFCQKLHLTQHLRTHSGEKPYECSECGKTFCQKTHLTLHQRNHSGERPYPCNECGKSFSRKSALSDHQRTHTGEKLYKCNECGKSYYRKSTLITHQRTHTGEKPYQCSECGKFFSRVSYLTIHYRSHLEEKPYECNECGKTFNLNSAFIRHRKVHTEEKSHECSECGKFSQLYLTDHHTAHLEEKPYECNECGKTFLVNSAFDGHQPLPKGEKSYECNVCGKLFNELSYYTEHYRSHSEEKPYGCSECGKTFSHNSSLFRHQRVHTGEKPYECYECGKFFSQKSYLTIHHRIHSGEKPYECSKCGKVFSRMSNLTVHYRSHSGEKPYECNECGKVFSQKSYLTVHYRTHSGEKPYECNECGKKFHHRSAFNSHQRIHRRGNMNVLDVENL

SEQ ID NO: 15555 - protein, 420 aa, Homo Sapiens
MATSLGSNTYNRQNWEDADFPILCQTCLGENPYIRMTKEKYGKECKICARPFTVFRWCPGVRMRFKKTEVCQTCSKLKNVCQTCLLDLEYGLPIQVRDAGLSFKDDMPKSDVNKEYYTQNMEREISNSDGTRPVGMLGKATSTSDMLLKLARTTPYYKRNRPHICSFWVKGECKRGEECPYRHEKPTDPDDPLADQNIKDRYYGINDPVADKLLKRASTMPRLDPPEDKTITTLYVGGLGDTITETDLRNHFYQFGEIRTITVVQRQQCAFIQFATRQAAEVAAEKSFNKLIVNGRRLNVKWGRSQAARGKEKEKDGTTDSGIKLEPVPGLPGALPPPPAAEEEASANYFNLPPSGPPAVVNIALPPPPGIAPPPPPGFGPHMFHPMGPPPPFMRAPGPIHYPSQDPQRMGAHAGKHSSP

SEQ ID NO: 15556 - protein, 500 aa, Homo Sapiens
MDHTEGSPAEEPPAHAPSPGKFGERPPPKRLTREAMRNYLKERGDQTVLILHAKVAQKSYGNEKRFFCPPPCVYLMGSGWKKKKEQMERDGCSEQESQPCAFIGIGNSDQEMQQLNLEGKNYCTAKTLYISDSDKRKHFMLSVKMFYGNSDDIGVFLSKRIKVISKPSKKKQSLKNADLCIASGTKVALFNRLRSQTVSTRYLHVEGGNFHASSQQWGAFFIHLLDDDESEGEEFTVRDGYIHYGQTVKLVCSVTGMALPRLIIRKVDKQTALLDADDPVSQLHKCAFYLKDTERMYLCLSQERIIQFQATPCPKEPNKEMINDGASWTIISTDKAEYTFYEGMGPVLAPVTPVPVVESLQLNGGGDVAMLELTGQNFTPNLRVWFGDVEAETMYRCGESMLCVVPDISAFREGWRWVRQPVQVPVTLVRNDGIIYSTSLTFTYTPEPGPRPHCSAAGAILRANSSQVPPNESNTNSEGSYTNASTNSTSVTSSTATVVS

SEQ ID NO: 15557 - protein, 517 aa, Homo Sapiens
MDPAGAADPSVPPNPLTHLSLQDRSEMQLQSEADRRSLPGTWTRSSPEHTTILRGGVRRCLQQQCEQTVRILHAKVAQKSYGNEKRFFCPPPCVYLSGPGWRVKPGQDQAHQAGETGPTVCGYMGLDSASGSATETQKLNFEQQPDSREFGCAKTLYISDADKRKHFRLVLRLVLRGGRELGTFHSRLIKVISKPSQKKQSLKNTDLCISSGSKVSLFNRLRSQTVSTRYLSVEDGAFVASARQWAAFTLHLADGHSAQGDFPPREGYVRYGSLVQLVCTVTGITLPPMIIRKVAKQCALLDVDEPISQLHKCAFQFPGSPPGGGGTYLCLATEKVVQFQASPCPKEANRALLNDSSCWTIIGTESVEFSFSTSLACTLEPVTPVPLISTLELSGGGDVATLELHGENFHAGLKVWFGDVEAETMYRSPRSLVCVVPDVAAFCSDWRWLRAPITIPMSLVRADGLFYPSAFSFTYTPEYSVRPGHPGVPEPATDADALLESIHQEFTRTNFHLFIQT

SEQ ID NO: 15558 - protein, 1133 aa, Homo Sapiens
MPVQAPQWTDFLSCPICTQTFDETIRKPISLGCGHTVCKMCLNKLHRKACPFDQTTINTDIELLPVNSALLQLVGAQVPEQQPITLCSGVEDTKHYEEAKKCVEELALYLKPLSSARGVGLNSTTQSVLSRPMQRKLVTLVHCQLVEEEGRIRAMRAARSLGERTVTELILQHQNPQQLSSNLWAAVRARGCQFLGPAMQEEALKLVLLALEDGSALSRKVLVLFVVQRLEPRFPQASKTSIGHVVQLLYRASCFKVTKRDEDSSLMQLKEEFRTYEALRREHDSQIVQIAMEAGLRIAPDQWSSLLYGDQSHKSHMQSIIDKLQTPASFAQSVQELTIALQRTGDPANLNRLRPHLELLANIDPSPDAPPPTWEQLENGLVAVRTVVHGLVDYIQNHSKKGADQQQPPQHSKYKTYMCRDMKQRGGCPRGASCTFAHSQEELEKFRKMNKRLVPRRPLSASLGQLNEVGLPSAAILPDEGAVDLPSRKPPALPNGIVSTGNTVTQLIPRGTDPSYDSSLKPGKIDHLSSSAPGSPPDLLESVPKSISALPVNPHSIPPRGPADLPPMPVTKPLQMVPRGSQLYPAQQTDVYYQDPRGAAPPFEPAPYQQGMYYTPPPQCVSRFVRPPPSAPEPAPPYLDHYPPYLQERVVNSQYGTQPQQYPPIYPSHYDGRRVYPAPSYTREEIFRESPIPIEIPPAAVPSYVPESRERYQQIESYYPVAPHPTQIRPSYLREPPYSRLPPPPQPHPSLDELHRRRKEIMAQLEERKVISPPPFAPSPTLPPTFHPEEFLDEDLKVAGKYKGNDYSQYSPWSCDTIGSYIGTKDAKPKDVVAAGSVEMMNVESKGMRDQRLDLQRRAAETSDDDLIPFGDRPTVSRFGAISRTSKTIYQGAGPMQAMAPQGAPTKSINISDYSPYGTHGGWGASPYSPHQNIPSQGHFSERERISMSEVASHGKPLPSAEREQLRLELQQLNHQISQQTQLRGLEAVSNRLVLQREANTLAGQSQPPPPPPPKWPGMISSEQLSLELHQVEREIGKRTRELSMENQCSLDMKSKLNTSKQAENGQPEPQNKVPAEDLTLTFSDVPNGSALTQENISLLSNKTSSLNLSEDPEGGGDNNDSQRSGVTPSSAP

SEQ ID NO: 15559 - protein, 1191 aa, Homo Sapiens
MPVQAAQWTEFLSCPICYNEFDENVHKPISLGCSHTVCKTCLNKLHRKACPFDQTAINTDIDVLPVNFALLQLVGAQVPDHQSIKLSNLGENKHYEVAKKCVEDLALYLKPLSGGKGVASLNQSALSRPMQRKLVTLVNCQLVEEEGRVRAMRAARSLGERTVTELILQHQNPQQLSANLWAAVRARGCQFLGPAMQEEALKLVLLALEDGSALSRKVLVLFVVQRLEPRFPQASKTSIGHVVQLLYRASCFKVTKRDEDSSLMQLKEEFRSYEALRREHDAQIVHIAMEAGLRISPEQWSSLLYGDLAHKSHMQSIIDKLQSPESFAKSVQELTIVLQRTGDPANLNRLRPHLELLANIDPNPDAVSPTWEQLENAMVAVKTVVHGLVDFIQNYSRKGHETPQPQPNSKYKTSMCRDLRQQGGCPRGTNCTFAHSQEELEKYRLRNKKINATVRTFPLLNKVGVNNTVTTTAGNVISVIGSTETTGKIVPSTNGISNAENSVSQLISRSTDSTLRALETVKKVGKVGANGQNAAGPSADSVTENKIGSPPKTPVSNVAATSAGPSNVGTELNSVPQKSSPFLTRVPVYPPHSENIQYFQDPRTQIPFEVPQYPQTGYYPPPPTVPAGVAPCVPRFVRSNNVPESSLPPASMPYADHYSTFSPRDRMNSSPYQPPPPQPYGPVPPVPSGMYAPVYDSRRIWRPPMYQRDDIIRSNSLPPMDVMHSSVYQTSLRERYNSLDGYYSVACQPPSEPRTTVPLPREPCGHLKTSCEEQIRRKPDQWAQYHTQKAPLVSSTLPVATQSPTPPSPLFSVDFRADFSESVSGTKFEEDHLSHYSPWSCGTIGSCINAIDSEPKDVIANSNAVLMDLDSGDVKRRVHLFETQRRTKEEDPIIPFSDGPIISKWGAISRSSRTGYHTTDPVQATASQGSATKPISVSDYVPYVNAVDSRWSSYGNEATSSAHYVERDRFIVTDLSGHRKHSSTGDLLSLELQQAKSNSLLLQREANALAMQQKWNSLDEGRHLTLNLLSKEIELRNGELQSDYTEDATDTKPDRDIELELSALDTDEPDGQSEPIEEILDIQLGISSQNDQLLNGMAVENGHPVQQHQKEPPKQKKQSLGEDHVILEEQKTILPVTSCFSQPLPVSISNASCLPITTSVSAGNLILKTHVMSEDKNDFLKPVANGKMVNS

SEQ ID NO: 15560 - protein, 485 aa, Homo Sapiens; identical to SEQ ID NO: 11271

SEQ ID NO: 15561 - protein, 523 aa, Homo Sapiens
MPSVMEKPSAGSGILSRSRAKTVPNGGQPHSEDDSSEEEHSHDSMIRVGTNYQAVIPECKPESPARYSNKELKGMLVWSPNHCVSDAKLDKYIAMAKEKHGYNIEQALGMLLWHKHDVEKSLADLANFTPFPDEWTVEDKVLFEQAFGFHGKCFQRIQQMLPDKLIPSLVKYYYSWKKTRSRTSVMDRQARRLGGRKDKEDSDELEEGRGGVSEGEPDPADPKREPLPSRPLNARPGPGKKEVQVSQYRHHPLRTRRRPPKGMYLSPEGLTAVSGSPDLANLTLRGLDSQLISLKRQVQSMKQTNSSLRQALEGGIDPLRPPEANTKFNSRWTTDEQLLAVQAIRRYGKDFGAIAEVIGNKTLTQVKTFFVSYRRRFNLEEVLQEWEAEQDGAPGAPVPMEEARRGAPLPAPALEEDDEVQITSVSTSVPRSVPPAPPPPPPPTSLSQPPPLLRPPLPTAPTLLRQPPPLQQGRFLQPRLAPNQPPPPLIRPALAAPRHSARPGPQPPPTLIGTPLEPPAPSL

SEQ ID NO: 15562 - protein, 495 aa, Homo Sapiens
MRVGAEYQARIPEFDPGATKYTDKDNGGMLVWSPYHSIPDAKLDEYIAIAKEKHGYNVEQALGMLFWHKHNIEKSLADLPNFTPFPDEWTVEDKVLFEQAFSFHGKSFHRIQQMLPDKTIASLVKYYYSWKKTRSRTSLMDRQARKLANRHNQGDSDDDVEETHPMDGNDSDYDPKKEAKKEGNTEQPVQTSKIGLGRREYQSLQHRHHSQRSKCRPPKGMYLTQEDVVAVSCSPNAANTILRQLDMELISLKRQVQNAKQVNSALKQKMEGGIEEFKPPESNQKINARWTTEEQLLAVQGVRKYGKDFQAIADVIGNKTVGQVKNFFVNYRRRFNLEEVLQEWEAEQGTQASNGDASTLGEETKSASNVPSGKSTDEEEEAQTPQAPRTLGPSPPAPSSTPTPTAPIATLNQPPPLLRPTLPAAPALHRQPPPLQQQARFIQPRPTLNQPPPPLIRPANSMPPRLNPRPVLSTVGGQQPPSLIGIQTDSQSSLH

SEQ ID NO: 15563 - protein, 619 aa, Homo Sapiens
MASGAYNPYIEIIEQPRQRGMRFRYKCEGRSAGSIPGEHSTDNNRTYPSIQIMNYYGKGKVRITLVTKNDPYKPHPHDLVGKDCRDGYYEAEFGQERRPLFFQNLGIRCVKKKEVKEAIITRIKAGINPFNVPEKQLNDIEDCDLNVVRLCFQVFLPDEHGNLTTALPPVVSNPIYDNRAPNTAELRICRVNKNCGSVRGGDEIFLLCDKVQKDDIEVRFVLNDWEAKGIFSQADVHRQVAIVFKTPPYCKAITEPVTVKMQLRRPSDQEVSESMDFRYLPDEKDTYGNKAKKQKTTLLFQKLCQDHVETGFRHVDQDGLELLTSGDPPTLASQSAGITVNFPERPRPGLLGSIGEGRYFKKEPNLFSHDAVVREMPTGVSSQAESYYPSPGPISSGLSHHASMAPLPSSSWSSVAHPTPRSGNTNPLSSFSTRTLPSNSQGIPPFLRIPVGNDLNASNACIYNNADDIVGMEASSMPSADLYGISDPNMLSNCSVNMMTTSSDSMGETDNPRLLSMNLENPSCNSVLDPRDLRQLHQMSSSSMSAGANSNTTVFVSQSDAFEGSDFSCADNSMINESGPSNSTNPNSHGFVQDSQYSGIGSMQNEQLSDSFPYEFFQV

SEQ ID NO: 15564 - protein, 551 aa, Homo Sapiens
MDELFPLIFPAEPAQASGPYVEIIEQPKQRGMRFRYKCEGRSAGSIPGERSTDTTKTHPTIKINGYTGPGTVRISLVTKDPPHRPHPHELVGKDCRDGFYEAELCPDRCIHSFQNLGIQCVKKRDLEQAISQRIQTNNNPFQVPIEEQRGDYDLNAVRLCFQVTVRDPSGRPLRLPPVLSHPIFDNRAPNTAELKICRVNRNSGSCLGGDEIFLLCDKVQKEDIEVYFTGPGWEARGSFSQADVHRQVAIVFRTPPYADPSLQAPVRVSMQLRRPSDRELSEPMEFQYLPDTDDRHRIEEKRKRTYETFKSIMKKSPFSGPTDPRPPPRRIAVPSRSSASVPKPAPQPYPFTSSLSTINYDEFPTMVFPSGQISQASALAPAPPQVLPQAPAPAPAPAMVSALAQAPAPVPVLAPGPPQAVAPPAPKPTQAGEGTLSEALLQLQFDDEDLGALLGNSTDPAVFTDLASVDNSEFQQLLNQGIPVAPHTTEPMLMEYPEAITRLVTGAQRPPDPAPAPLGAPGLPNGLLSGDEDFSSIADMDFSALLSQISS

SEQ ID NO: 15565 - protein, 579 aa, Homo Sapiens
MLRSGPASGPSVPTGRAMPSRRVARPPAAPELGALGSPDLSSLSLAVSRSTDELEIIDEYIKENGFGLDGGQPGPGEGLPRLVSRGAASLSTVTLGPVAPPATPPPWGCPLGRLVSPAPGPGPQPHLVITEQPKQRGMRFRYECEGRSAGSILGESSTEASKTLPAIELRDCGGLREVEVTACLVWKDWPHRVHPHSLVGKDCTDGICRVRLRPHVSPRHSFNNLGIQCVRKKEIEAAIERKIQLGIDPYNAGSLKNHQEVDMNVVRICFQASYRDQQGQMRRMDPVLSEPVYDKKSTNTSELRICRINKESGPCTGGEELYLLCDKVQKEDISVVFSRASWEGRADFSQADVHRQIAIVFKTPPYEDLEIVEPVTVNVFLQRLTDGVCSEPLPFTYLPRDHDSYGVDKKRKRGMPDVLGELNSSDPHGIESKRRKKKPAILDHFLPNHGSGPFLPPSALLPDPDFFSGTVSLPGLEPPGGPDLLDDGFAYDPTAPTLFTMLDLLPPAPPHASAVVCSGGAGAVVGETPGPEPLTLDSYQAPGPGDGGTASLVGSNMFPNHYREAAFGGGLLSPGPEAT

SEQ ID NO: 15566 - protein, 1566 aa, Homo Sapiens
MTADKDKDKDKEKDRDRDRDREREKRDKARESENSRPRRSCTLEGGAKNYAESDHSEDEDNDNNSATAEESTKKNKKKPPKKKSRYERTDTGEITSYITEDDVVYRPGDCVYIESRRPNTPYFICSIQDFKLVHNSQACCRSPTPALCDPPACSLPVASQPPQHLSEAGRGPVGSKRDHLLMNVKWYYRQSEVPDSVYQHLVQDRHNENDSGRELVITDPVIKNRELFISDYVDTYHAAALRGKCNISHFSDIFAAREFKARVDSFFYILGYNPETRRLNSTQGEIRVGPSHQAKLPDLQPFPSPDGDTVTQHEELVWMPGVNDCDLLMYLRAARSMAAFAGMCDGGSTEDGCVAASRDDTTLNALNTLHESGYDAGKALQRLVKKPVPKLIEKCWTEDEVKRFVKGLRQYGKNFFRIRKELLPNKETGELITFYYYWKKTPEAASSRAHRRHRRQAVFRRIKTRTASTPVNTPSRPPSSEFLDLSSASEDDFDSEDSEQELKGYACRHCFTTTSKDWHHGGRENILLCTDCRIHFKKYGELPPIEKPVDPPPFMFKPVKEEDDGLSGKHSMRTRRSRGSMSTLRSGRKKQPASPDGRTSPINEDIRSSGRNSPSAASTSSNDSKAETVKKSAKKVKEEASSPLKSNKRQREKVASDTEEADRTSSKKTKTQEISRPNSPSEGEGESSDSRSVNDEGSSDPKDIDQDNRSTSPSIPSPQDNESDSDSSAQQQMLQAQPPALQAPTGVTPAPSSAPPGTPQLPTPGPTPSATAVPPQGSPTASQAPNQPQAPTAPVPHTHIQQAPALHPQRPPSPHPPPHPSPHPPLQPLTGSAGQPSAPSHAQPPLHGQGPPGPHSLQAGPLLQHPGPPQPFGLPPQASQGQAPLGTSPAAAYPHTSLQLPASQSALQSQQPPREQPLPPAPLAMPHIKPPPTTPIPQLPAPQAHKHPPHLSGPSPFSMNANLPPPPALKPLSSLSTHHPPSAHPPPLQLMPQSQPLPSSPAQPPGLTQSQNLPPPPASHPPTGLHQVAPQPPFAQHPFVPGGPPPITPPTCPSTSTPPAGPGTSAQPPCSGAAASGGSIAGGSSCPLPTVQIKEEALDDAEEPESPPPPPRSPSPEPTVVDTPSHASQSARFYKHLDRGYNSCARTDLYFMPLAGSKLAKKREEAIEKAKREAEQKAREEREREKEKEKEREREREREREAERAAKASSSAHEGRLSDPQLSGPGHMRPSFEPPPTTIAAVPPYIGPDTPALRTLSEYARPHVMSPTNRNHPFYMPLNPTDPLLAYHMPGLYNVDPTIRERELREREIREREIRERELRERMKPGFEVKPPELDPLHPAANPMEHFARHSALTIPPTAGPHPFASFHPGLNPLERERLALAGPQLRPEMSYPDRLAAERIHAERMASLTSDPLARLQMFNVTPHHHQHSHIHSHLHLHQQDPLHQGSAGPVHPLVDPLTAGPHLARFPYPPGTLPNPLLGQPPHEHEMLRHPVFGTPYPRDLPGAIPPPMSAAHQLQAMHAQSAELQRLAMEQQWLHGHPHMHGGHLPSQEDYYSRLKKEGDKQL

SEQ ID NO: 15567 - protein, 1097 aa, Homo Sapiens
MATQVMGQSSGGGGLFTSSGNIGMALPNDMYDLHDLSKAELAAPQLIMLANVALTGEVNGSCCDYLVGEERQMAELMPVGDNNFSDSEEGEGLEESADIKGEPHGLENMELRSLELSVVEPQPVFEASGAPDIYSSNKDLPPETPGAEDKGKSSKTKPFRCKPCQYEAESEEQFVHHIRVHSAKKFFVEESAEKQAKARESGSSTAEEGDFSKGPIRCDRCGYNTNRYDHYTAHLKHHTRAGDNERVYKCIICTYTTVSEYHWRKHLRNHFPRKVYTCGKCNYFSDRKNNYVQHVRTHTGERPYKCELCPYSSSQKTHLTRHMRTHSGEKPFKCDQCSYVASNQHEVTRHARQVHNGPKPLNCPHCDYKTADRSNFKKHVELHVNPRQFNCPVCDYAASKKCNLQYHFKSKHPTCPNKTMDVSKVKLKKTKKREADLPDNITNEKTEIEQTKIKGDVAGKKNEKSVKAEKRDVSKEKKPSNNVSVIQVTTRTRKSVTEVKEMDVHTGSNSEKFSKTKKSKRKLEVDSHSLHGPVNDEESSTKKKKKVESKSKNNSQEVPKGDSKVEENKKQNTCMKKSTKKKTLKNKSSKKSSKPPQKEPVEKGSAQMDPPQMGPAPTEAVQKGPVQVEPPPPMEHAQMEGAQIRPAPDEPVQMEVVQEGPAQKELLPPVEPAQMVGAQIVLAHMELPPPMETAQTEVAQMGPAPMEPAQMEVAQVESAPMQVVQKEPVQMELSPPMEVVQKEPVQIELSPPMEVVQKEPVKIELSPPIEVVQKEPVQMELSPPMGVVQKEPAQREPPPPREPPLHMEPISKKPPLRKDKKEKSNMQSERARKEQVLIEVGLVPVKDSWLLKESVSTEDLSPPSPPLPKENLREEASGDQKLLNTGEGNKEAPLQKVGAEEADESLPGLAANINESTHISSSGQNLNTPEGETLNGKHQTDSIVCEMKMDTDQNTRENLTGINSTVEEPVSPMLPPSAVEEREAVSKTALASPPATMAANESQEIDEDEGIHSHEGSDLSDNMSEGSDDSGLHGARPVPQESSRKNAKEALAVKAAKGDFVCIFCDRSFRKGKDYSKHLNRHLVNVYYLEEAAQGQE

SEQ ID NO: 15568 - protein, 979 aa, Homo Sapiens
MATQAYTELQAAPPPSQPPQAPPQAQPQPPPPPPPAAPQPPQPPTAAATPQPQYVTELQSPQPQAQPPGGQKQYVTELPAVPAPSQPTGAPTPSPAPQQYIVVTVSEGAMRASETVSEASPGSTASQTGVPTQVVQQVQGTQQRLLVQTSVQAKPGHVSPLQLTNIQVPQQALPTQRLVVQSAAPGSKGGQVSLTVHGTQQVHSPPEQSPVQANSSSSKTAGAPTGTVPQQLQVHGVQQSVPVTQERSVVQATPQAPKPGPVQPLTVQGLQPVHVAQEVQQLQQVPVPHVYSSQVQYVEGGDASYTASAIRSSTYSYPETPLYTQTASTSYYEAAGTATQVSTPATSQAVASSGSMPMYVSGSQVVASSTSTGAGASNSSGGGGSGGGGGGGGGGGGGGSGSTGGGGSGAGTYVIQGGYMLGSASQSYSHTTRASPATVQWLLDNYETAEGVSLPRSTLYCHYLLHCQEQKLEPVNAASFGKLIRSVFMGLRTRRLGTRGNSKYHYYGLRIKASSPLLRLMEDQQHMAMRGQPFSQKQRLKPIQKMEGMTNGVAVGQQPSTGLSDISAQVQQYQQFLDASRSLPDFTELDLQGKVLPEGVGPGDIKAFQVLYREHCEAIVDVMVNLQFTLVETLWKTFWRYNLSQPSEAPPLAVHDEAEKRLPKAILVLLSKFEPVLQWTKHCDNVLYQGLVEILIPDVLRPIPSALTQAIRNFAKSLESWLTHAMVNIPEEMLRVKVAAAGAFAQTLRRYTSLNHLAQAARAVLQNTAQINQMLSDLNRVDFANVQEQASWVCRCEDRVVQRLEQDFKVTLQQQNSLEQWAAWLDGVVSQVLKPYQGSAGFPKAAKLFLLKWSFYSSMVIRDLTLRSAASFGSFHLIRLLYDEYMYYLIEHRVAQAKGETPIAVMGEFANLATSLNPLDPDKDEEEEEEEESEDELPQDISLAAGGESPALGPETLEPPAKLARTDARGLFVQALPSS

SEQ ID NO: 15569 - protein, 723 aa, Homo Sapiens
MQNSEGGADSPASVALRPSAAAPPVPASPQRVLVQAASSNPKGAQMQPISLPRVQQVPQQVQPVQHVYPAQVQYVEGGDAVYTNGAIRTAYTYNPEPQMYAPSSTASYFEAPGGAQVTVAASSPPAVPSHSMVGITMDVGGSPIVSSAGAYLIHGGMDSTRHSLAHTSRSSPATLEMAIENLQKSEGITSHKSGLLNSHLQWLLDNYETAEGVSLPRSSLYNHYLRHCQEHKLDPVNAASFGKLIRSVFMGLRTRRLGTRGNSKYHYYGIRLKPDSPLNRLQEDTQYMAMRQQPMHQKPRYRPAQKTDSLGDSGSHSGLHSTPEQTMAVQSQHHQQYIDVSHVFPEFPAPDLGSFLLQDGVTLHDVKALQLVYRRHCEATVDVVMNLQFHYIEKLWLSFWNSKASSSDGPTSLPASDEDPEGAVLPKDKLISLCQCDPILRWMRSCDHILYQALVEILIPDVLRPVPSTLTQAIRNFAKSLEGWLTNAMSDFPQQVIQTKVGVVSAFAQTLRRYTSLNHLAQAARAVLQNTSQINQMLSDLNRVDFANVQEQASWVCQCEESVVQRLEQDFKLTLQQQSSLDQWASWLDSVVTQVLKQHAGSPSFPKAARQFLLKWSFYSSMVIRDLTLRSAASFGSFHLIRLLYDEYMFYLVEHRVAEATGETPIAVMGEFNDLASLSLTLLDKDDMGDEQRGSEAGPDARSLGEPLVKRERSDPNHSLQGI

SEQ ID NO: 15570 - protein, 749 aa, Homo Sapiens
MQTSETGSDTGSTVTLQTSVASQAAVPTQVVQQVPVQQQVQQVQTVQQVQHVYPAQVQYVEGSDTVYTNGAIRTTTYPYTETQMYSQNTGGNYFDTQGSSAQVTTVVSSHSMVGTGGIQMGVTGGQLISSSGGTYLIGNSMENSGHSVTHTTRASPATIEMAIETLQKSDGLSTHRSSLLNSHLQWLLDNYETAEGVSLPRSTLYNHYLRHCQEHKLDPVNAASFGKLIRSIFMGLRTRRLGTRGNSKYHYYGIRVKPDSPLNRLQEDMQYMAMRQQPMQQKQRYKPMQKVDGVADGFTGSGQQTGTSVEQTVIAQSQHHQQFLDASRALPEFGEVEISSLPDGTTFEDIKSLQSLYREHCEAILDVVVNLQFSLIEKLWQTFWRYSPSTPTDGTTITESSNLSEIESRLPKAKLITLCKHESILKWMCNCDHGMYQALVEILIPDVLRPIPSALTQAIRNFAKSLEGWLSNAMNNIPQRMIQTKVAAVSAFAQTLRRYTSLNHLAQAARAVLQNTSQINQMLSDLNRVDFANVQEQASWVCQCDDNMVQRLETDFKMTLQQQSTLEQWAAWLDNVMMQALKPYEGRPSFPKAARQFLLKWSFYSSMVIRDLTLRSAASFGSFHLIRLLYDEYMFYLVEHRVAQATGETPIAVMGEFGDLNAVSPGNLDKDEGSEVESEMDEELDDSSEPQAKREKTELSQAFPVGCMQPVLETGVQPSLLNPIHSEHIVTSTQTIRQCSATGNTYTAV

SEQ ID NO: 15571 - protein, 735 aa, Homo Sapiens
MHCGLLEEPDMDSTESWIERCLNESENKRYSSHTSLGNVSNDENEEKENNRASKPHSTPATLQWLEENYEIAEGVCIPRSALYMHYLDFCEKNDTQPVNAASFGKIIRQQFPQLTTRRLGTRGQSKYHYYGIAVKESSQYYDVMYSKKGAAWVSETGKKEVSKQTVAYSPRSKLGTLLPEFPNVKDLNLPASLPEEKVSTFIMMYRTHCQRILDTVIRANFDEVQSFLLHFWQGMPPHMLPVLGSSTVVNIVGVCDSILYKAISGVLMPTVLQALPDSLTQVIRKFAKQLDEWLKVALHDLPENLRNIKFELSRRFSQILRRQTSLNHLCQASRTVIHSADITFQMLEDWRNVDLNSITKQTLYTMEDSRDEHRKLITQLYQEFDHLLEEQSPIESYIEWLDTMVDRCVVKVAAKRQGSLKKVAQQFLLMWSCFGTRVIRDMTLHSAPSFGSFHLIHLMFDDYVLYLLESLHCQERANELMRAMKGEGSTAEVREEIILTEAAAPTPSPVPSFSPAKSATSVEVPPPSSPVSNPSPEYTGLSTTGAMQSYTWSLTYTVTTAAGSPAENSQQLPCMRNTHVPSSSVTHRIPVYPHREEHGYTGSYNYGSYGNQHPHPMQSQYPALPHDTAISGPLHYAPYHRSSAQYPFNSPTSRMEPCLMSSTPRLHPTPVTPRWPEVPSANTCYTSPSVHSARYGNSSDMYTPLTTRRNSEYEHMQHFPGFAYINGEASTGWAK

SEQ ID NO: 15572 - protein, 616 aa, Homo Sapiens
MAEDEPDAKSPKTGGRAPPGGAEAGEPTTLLQRLRGTISKAVQNKVEGILQDVQKFSDNDKLYLYLQLPSGPTTGDKSSEPSTLSNEEYMYAYRWIRNHLEEHTDTCLPKQSVYDAYRKYCESLACCRPLSTANFGKIIREIFPDIKARRLGGRGQSKYCYSGIRRKTLVSMPPLPGLDLKGSESPEMGPEVTPAPRDELVEAACALTCDWAERILKRSFSSIVEVARFLLQQHLISARSAHAHVLKAMGLAEEDEHAPRERSSKPKNGLENPEGGAHKKPERLAQPPKDLEARTGAGPLARGERKKSVVESSAPGANNLQVNALVARLPLLLPRAPRSLIPPIPVSPPILAPRLSSGALKVATLPLSSRAGAPPAAVPIINMILPTVPALPGPGPGPGRAPPGGLTQPRGTENREVGIGGDQGPHDKGVKRTAEVPVSEASGQAPPAKAAKQDIEDTASDAKRKRGRPRKKSGGSGERNSTPLKSAAAMESAQSSRLPWETWGSGGEGNSAGGAERPGPMGEAEKGAVLAQGQGDGTVSKGGRGPGSQHTKEAEDKIPLVPSKVSVIKGSRSQKEAFPLAKGEVDTAPQGNKDLKEHVLQSSLSQEHKDPKATPP

SEQ ID NO: 15573 - protein, 928 aa, Homo Sapiens
MAKVPELEDTFLQAQPAPQLSPGIQEDCCVQLLGKGLLVYPEETVYLAAEGQPGGEQGGGEKGEDPELPGAVKSEMHLNNGNFSSEEEDADNHDSKTKAADQYLSQKKTITQIVKDKKKQTQLTLQWLEENYIVCEGVCLPRCILYAHYLDFCRKEKLEPACAATFGKTIRQKFPLLTTRRLGTRGHSKYHYYGIGIKESSAYYHSVYSGKGLTRFSGSKLKNEGGFTRKYSLSSKTGTLLPEFPSAQHLVYQGCISKDKVDTLIMMYKTHCQCILDNAINGNFEEIQHFLLHFWQGMPDHLLPLLENPVIIDIFCVCDSILYKVLTDVLIPATMQEMPESLLADIRNFAKNWEQWVVSSLENLPEALTDKKIPIVRRFVSSLKRQTSFLHLAQIARPALFDQHVVNSMVSDIERVDLNSIGSQALLTISGSTDTESGIYTEHDSITVFQELKDLLKKNATVEAFIEWLDTVVEQRVIKTSKQNGRSLKKRAQDFLLKWSFFGARVMHNLTLNNASSFGSFHLIRMLLDEYILLAMETQFNNDKEQELQNLLDKYMKNSDASKAAFTASPSSCFLANRNKGSMVSSDAVKNESHVETTYLPLPSSQPGGLGPALHQFPAGNTDNMPLTGQMELSQIAGHLMTPPISPAMASRGSVINQGPMAGRPPSVGPVLSAPSHCSTYPEPIYPTLPQANHDFYSTSSNYQTVFRAQPHSTSGLYPHHTEHGRCMAWTEQQLSRDFFSGSCAGSPYNSRPPSSYGPSLQAQDSHNMQFLNTGSFNFLSNTGAASCQGATLPPNSPNGYYGSNINYPESHRLGSMVNQHVSVISSIRSLPPYSDIHDPLNILDDSGRKQTSSFYTDTSSPVACRTPVLASSLQTPIPSSSSQCMYGTSNQYPAQETLDSHGTSSREMVSSLPPINTVFMGTAAGGT

SEQ ID NO: 15574 - protein, 1363 aa, Homo Sapiens
MSSSRAQQMHAFSWIRNTLEEHPETSLPKQEVYDEYKSYCDNLGYHPLSAADFGKIMKNVFPNMKARRLGTRGKSKYCYSGLRKKAFVHMPTLPNLDFHKTGDGLEGAEPSGQLQNIDEEVISSACRLVCEWAQKVLSQPFDTVLELARFLVKSHYIGTKSMAALTVMAAAPAGMKGITQPSAFIPTAESNSFQPQVKTLPSPIDAKQQLQRKIQKKQQEQKLQSPLPGESAAKKSESATSNGVTNLPNGNPSILSPQPIGIVVAAVPSPIPVQRTRQLVTSPSPMSSSDGKVLPLNVQVVTQHMQSVKQAPKTPQNVPASPGGDRSARHRYPQILPKPANTSALTIRSPTTVLFTSSPIKTAVVPASHMSSLNVVKMTTISLTPSNSNTPLKHSASVSSATGTTEESRSVPQIKNGSVVSLQSPGSRSSSAGGTSAVEVKVEPETSSDEHPVQCQENSDEAKAPQTPSALLGQKSNTDGALQKPSNEGVIEIKATKVCDQRTKCKSRCNEMLPGTSTGNNQSTITLSVASQNLTFTSSSSPPNGDSINKDPKLCTKSPRKRLSSTLQETQVPPVKKPIVEQLSAATIEGQKQGSVKKDQKVPHSGKTEGSTAGAQIPSKVSVNVSSHIGANQPLNSSALVISDSALEQQTTPSSSPDIKVKLEGSVFLLDSDSKSVGSFNPNGWQQITKDSEFISASCEQQQDISVMTIPEHSDINDLEKSVWELEGMPQDTYSQQLHSQIQESSLNQIQAHSSDQLPLQSELKEFEPSVSQTNESYFPFDDELTQDSIVEELVLMEQQMSMNNSHSYGNCLGMTLQSQSVTPGAPMSSHTSSTHFYHPIHSNGTPIHTPTPTPTPTPTPTPTPTPTSEMIAGSQSLSRESPCSRLAQTTPVDSALGSSRHTPIGTPHSNCSSSVPPSPVECRNPFAFTPISSSMAYHDASIVSSSPVKPMQRPMATHPDKTKLEWMNNGYSGVGNSSVSGHGILPSYQELVEDRFRKPHAFAVPGQSYQSQSRHHDTHFGRLTPVSPVQHQGATVNNTNKQEGFAVPAPLDNKGTNSSASSNFRCRSVSPAVHRQRNLSGSTLYPVSNIPRSNVTPFGSPVTPEVHVFTNVHTDACANNIAQRSQSVPLTVMMQTAFPNALQKQANSKKITNVLLSKLDSDNDDAVRGLGMNNLPSNYTARMNLTQILEPSTVFPSANPQNMIDSSTSVYEFQTPSYLTKSNSTGQINFSPGDNQAQSEIGEQQLDFNSTVKDLLSGDSLQTNQQLVGQGASDLTNTASDFSSDIRLSSELSGSINDLNTLDPNLLFDPGRQQGQDDEATLEELKNDPLFQQICSESMNSMTSSGFEWIESKDHPTVEMLG

SEQ ID NO: 15575 - protein, 586 aa, Homo Sapiens
MAEGVPASPSSGEGSRGPHSGVIQWLVDNFCICEECSVPRCLMYEIYVETCGQNTENQVNPATFGKLVRLVFPDLGTRRLGTRGSARYHYDGICIKKSSFFYAQYCYLIGEKRYHSGDAIAFEKSTNYNSIIQQEATCEDHSPMKTDPVGSPLSEFRRCPFLEQEQAKKYSCNMMAFLADEYCNYCRDILRNVEDLLTSFWKSLQQDTVMLMSLPDVCQLFKCYDVQLYKGIEDVLLHDFLEDVSIQYLKSVQLFSKKFKLWLLNALEGVPALLQISKLKEVTLFVKRLRRKTYLSNMAKTMRMVLKSKRRVSVLKSDLQAIINQGTLATSKKALASDRSGADELENNPEMKCLRNLISLLGTSTDLRVFLSCLSSHLQAFVFQTSRSKEEFTKLAASFQLRWNLLLTAVSKAMTLCHRDSFGSWHLFHLLLLEYMIHILQSCLEEEEEEEDMGTVKEMLPDDPTLGQPDQALFHSLNSSLSQACASPSMEPLGVMPTHMGQGRYPVGVSNMVLRILGFLVDTAMGNKLIQVLLEDETTESAVKLSLPMGQEALITLKDGQQFVIQISDVPQSSEDIYFRENNANV

SEQ ID NO: 15576 - protein, 260 aa, Homo Sapiens
MELTQPAEDLIQTQQTPASELGDPEDPGEEAADGSDTVVLSLFPCTPEPVNPEPDASVSSPQAGSSLKHSTTLTNRQRGNEVSALPATLDSLSIHQLAAQGELDQLKEHLRKGDNLVNKPDERGFTPLIWASAFGEIETVRFLLEWGADPHILAKERESALSLASTGGYTDIVGLLLERDVDINIYDWNGGTPLLYAVRGNHVKCVEALLARGADLTTEADSGYTPMDLAVALGYRKVQQVIENHILKLFQSNLVPADPE

SEQ ID NO: 15577 - protein, 272 aa, Homo Sapiens
MEAQGVAEGAGPGAASGVPHPAALAPAAAPTLAPASVAAAASQFTLLVMQPCAGQDEAAAPGGSVGAGKPVRYLCEGAGDGEEEAGEDEADLLDTSDPPGGGESAASLEDLEDEETHSGGEGSSGGARRRGSGGGSMSKTCTYEGCSETTSQVAKQRKPWMCKKHRNKMYKDKYKKKKSDQALNCGGTASTGSAGNVKLEESADNILSIVKQRTGSFGDRPARPTLLEQVLNQKRLSLLRSPEVVQFLQKQQQLLNQQVLEQRQQQFPGTSM

SEQ ID NO: 15578 - protein, 184 aa, Homo Sapiens
MARSLVHDTVFYCLSVYQVKISPTPQLGAASSAEGHVGQGAPGLMGNMNPEGGVNHENGMNRDGGMIPEGGGGNQEPRQQPQPPPEEPAQAAMEGPQPENMQPRTRRTKFTLLQVEELESVFRHTQYPDVPTRRELAENLGVTEDKVRVWFKNKRARCRRHQRELMLANELRADPDDCVYIVVD

SEQ ID NO: 15579 - protein, 288 aa, Homo Sapiens
MEPPDQCSQYMTSLLSPAVDDEKELQDMNAMVLSLTEEVKEEEEDAQPEPEQGTAAGEKLKSAGAQGGEEKDGGGEEKDGGGAGVPGHLWEGDLEGTSGSDGNVEDSDQSEKEPGQQYSRPQGAVGGLEPGNAQQPNVHAFTPLQLQELERIFQREQFPSEFLRRRLARSMNVTELAVQIWFENRRAKWRRHQRALMARNMLPFMAVGQPVMVTAAEAITAPLFISGMRDDYFWDHSHSSSLCFPMPPFPPPSLPLPLMLLPPMPPAGQAEFGPFPFVIVPSFTFPNV

SEQ ID NO: 15580 - protein, 288 aa, Homo Sapiens
MEPPDQCSQYMTSLLSPAVDDEKELQDMNAMVLSLTEEVKEEEEDAQPEPEQGTAAGEKLKSAGAQGGEEKDGGGEEKDGGGAGVPGHLWEGNLEGTSGSDGNVEDSDQSEKEPGQQYSRPQGAVGGLEPGNAQQPNVHAFTPLQLQELECIFQREQFPSEFLRRRLARSMNVTELAVQIWFENRRAKWRRHQRALMARNMLPFMAVGQPVMVTAAEAITAPLFISGMRDDYFWDHSHSSSLCFPMPPFPPPSLPLPLMLLPPMPPAGQAEFGPFPFVIVPSFTFPNV

SEQ ID NO: 15581 - protein, 131 aa, Homo Sapiens; identical to SEQ ID NO: 7198

SEQ ID NO: 15582 - protein, 1914 aa, Homo Sapiens
MADGKGDAAAVAGAGAEAPAVAGAGDGVETESMVRGHRPVSPAPGASGLRPCLWQLETELREQEVSEVSSLNYCRSFCQTLLQYASNKNASEHIVYLLEVYRLAIQSFASARPYLTTECEDVLLVLGRLVLSCFELLLSVSESELPCEVWLPFLQSLQESHDALLEFGNNNLQILVHVTKEGVWKNPVLLKILSQQPVETEEVNKLIAQEGPSFLQMRIKHLLKSNCIPQATALSKLCAESKEISNVSSFQQAYITCLCSMLPNEDAIKEIAKVDCKEVLDIICNLESEGQDNTAFVLCTTYLTQQLQTASVYCSWELTLFWSKLQRRIDPSLDTFLERCRQFGVIAKTQQHLFCLIRVIQTEAQDAGLGVSILLCVRALQLRSSEDEEMKASVCKTIACLLPEDLEVRRACQLTEFLIEPSLDGFNMLEELYLQPDQKFDEENAPVPNSLRCELLLALKAHWPFDPEFWDWKTLKRHCHQLLGQEASDSDDDLSGYEMSINDTDVLESFLSDYDEGKEDKQYRRRDLTDQHKEKRDKKPIGSSERYQRWLQYKFFCLLCKRECIEARILHHSKMHMEDGIYTCPVCIKKFKRKEMFVPHVMEHVKMPPSRRDRSKKKLLLKGSQKGICPKSPSAIPEQNHSLNDQAKGESHEYVTFSKLEDCHLQDRDLYPCPGTDCSRVFKQFKYLSVHLKAEHQNNDENAKHYLDMKNRREKCTYCRRHFMSAFHLREHEQVHCGPQPYMCVSIDCYARFGSVNELLNHKQKHDDLRYKCELNGCNIVFSDLGQLYHHEAQHFRDASYTCNFLGCKKFYYSKIEYQNHLSMHNVENSNGDIKKSVKLEESATGEKQDCINQPHLLNQTDKSHLPEDLFCAESANSQIDTETAENLKENSDSNSSDQLSHSSSASMNEELIDTLDHSETMQDVLLSNEKVFGPSSLKEKCSSMAVCFDGTKFTCGFDGCGSTYKNARGMQKHLRKVHPYHFKPKKIKTKDLFPSLGNEHNQTTEKLDAEPKPCSDTNSDSPDEGLDHNIHIKCKREHQGYSSESSICASKRPCTEDTMLELLLRLKHLSLKNSITHGSFSGSLQGYPSSGAKSLQSVSSISDLNFQNQDENMPSQYLAQLAAKPFFCELQGCKYEFVTREALLMHYLKKHNYSKEKVLQLTMFQHRYSPFQCHICQRSFTRKTHLRIHYKNKHQIGSDRATHKLLDNEKCDHEGPCSVDRLKGDCSAELGGDPSSNSEKPHCHPKKDECSSETDLESSCEETESKTSDISSPIGSHREEQEGREGRGSRRTVAKGNLCYILNKYHKPFHCIHKTCNSSFTNLKGLIRHYRTVHQYNKEQLCLEKDKARTKRELVKCKKIFACKYKECNKRFLCSKALAKHCSDSHNLDHIEEPKVLSEAGSAARFSCNQPQCPAVFYTFNKLKHHLMEQHNIEGEIHSDYEIHCDLNGCGQIFTHRSNYSQHVYYRHKDYYDDLFRSQKVANERLLRSEKVCQTADTQGHEHQTTRRSFNAKSKKCGLIKEKKAPISFKTRAEALHMCVEHSEHTQYPCMVQGCLSVVKLESSIVRHYKRTHQMSSAYLEQQMENLVVCVKYGTKIKEEPPSEADPCIKKEENRSCESERTEHSHSPGDSSAPIQNTDCCHSSERDGGQKGCIESSSVFDADTLLYRGTLKCNHSSKTTSLEQCNIVQPPPPCKIENSIPNPNGTESGTYFTSFQLPLPRIKESETRQHSSGQENTVKNPTHVPKENFRKHSQPRSFDLKTYKPMGFESSFLKFIQESEEKEDDFDDWEPSEHLTLSNSSQSSNDLTGNVVANNMVNDSEPEVDIPHSSSDSTIHENLTAIPPLIVAETTTVPSLENLRVVLDKALTDCGELALKQLHYLRPVVVLERSKFSTPILDLFPTKKTDELCVGSS

SEQ ID NO: 15583 - protein, 523 aa, Homo Sapiens
MESAPAAPDPAASEPGSSGADAAAGSRETPLNQESARKSEPPAPVRRQSYSSTSRGISVTKKTHTSQIEIIPCKICGDKSSGIHYGVITCEGCKGFFRRSQQSNATYSCPRQKNCLIDRTSRNRCQHCRLQKCLAVGMSRDAVKFGRMSKKQRDSLYAEVQKHRMQQQQRDHQQQPGEAEPLTPTYNISANGLTELHDDLSNYIDGHTPEGSKADSAVSSFYLDIQPSPDQSGLDINGIKPEPICDYTPASGFFPYCSFTNGETSPTVSMAELEHLAQNISKSHLETCQYLREELQQITWQTFLQEEIENYQNKQREVMWQLCAIKITEAIQYVVEFAKRIDGFMELCQNDQIVLLKAGSLEVVFIRMCRAFDSQNNTVYFDGKYASPDVFKSLGCEDFISFVFEFGKSLCSMHLTEDEIALFSAFVLMSADRSWLQEKVKIEKLQQKIQLALQHVLQKNHREDGILTKLICKVSTLRALCGRHTEKLMAFKAIYPDIVRLHFPPLYKELFTSEFEPAMQIDG

SEQ ID NO: 15584 - protein, 470 aa, Homo Sapiens
MCENQLKTKADATAQIEVIPCKICGDKSSGIHYGVITCEGCKGFFRRSQQNNASYSCPRQRNCLIDRTNRNRCQHCRLQKCLALGMSRDAVKFGRMSKKQRDSLYAEVQKHQQRLQEQRQQQSGEAEALARVYSSSISNGLSNLNNETSGTYANGHVIDLPKSEGYYNVDSGQPSPDQSGLDMTGIKQIKQEPIYDLTSVPNLFTYSSFNNGQLAPGITMTEIDRIAQNIIKSHLETCQYTMEELHQLAWQTHTYEEIKAYQSKSREALWQQCAIQITHAIQYVVEFAKRITGFMELCQNDQILLLKSGCLEVVLVRMCRAFNPLNNTVLFEGKYGGMQMFKALGSDDLVNEAFDFAKNLCSLQLTEEEIALFSSAVLISPDRAWLIEPRKVQKLQEKIYFALQHVIQKNHLDDETLAKLIAKIPTITAVCNLHGEKLQVFKQSHPEIVNTLFPPLYKELFNPDCATGCK

SEQ ID NO: 15585 - protein, 518 aa, Homo Sapiens
MDRAPQRQHRASRELLAAKKTHTSQIEVIPCKICGDKSSGIHYGVITCEGCKGFFRRSQRCNAAYSCTRQQNCPIDRTSRNRCQHCRLQKCLALGMSRDAVKFGRMSKKQRDSLHAEVQKQLQQRQQQQQEPVVKTPPAGAQGADTLTYTLGLPDGQLPLGSSPDLPEASACPPGLLKASGSGPSYSNNLAKAGLNGASCHLEYSPERGKAEGRESFYSTGSQLTPDRCGLRFEEHRHPGLGELGQGPDSYGSPSFRSTPEAPYASLTEIEHLVQSVCKSYRETCQLRLEDLLRQRSNIFSREEVTGYQRKSMWEMWERCAHHLTEAIQYVVEFAKRLSGFMELCQNDQIVLLKAGAMEVVLVRMCRAYNADNRTVFFEGKYGGMELFRALGCSELISSIFDFSHSLSALHFSEDEIALYTALVLINAHRPGLQEKRKVEQLQYNLELAFHHHLCKTHRQSILAKLPPKGKLRSLCSQHVERLQIFQHLHPIVVQAAFPPLYKELFSTETESPVGLSK

SEQ ID NO: 15586 - protein, 497 aa, Homo Sapiens
MRTQIEVIPCKICGDKSSGIHYGVITCEGCKGFFRRSQRCNAAYSCTRQQNCPIDRTSRNRCQHCRLQKCLALGMSRDAVKFGRMSKKQRDSLHAEVQKQLQQRQQQQQEPVVKTPPAGAQGADTLTYTLGLPDGQLPLGSSPDLPEASACPPGLLKASGSGPSYSNNLAKAGLNGASCHLEYSPERGKAEGRESFYSTGSQLTPDRCGLRFEEHRHPGLGELGQGPDSYGSPSFRSTPEAPYASLTEIEHLVQSVCKSYRETCQLRLEDLLRQRSNIFSREEVTGYQRKSMWEMWERCAHHLTEAIQYVVEFAKRLSGFMELCQNDQIVLLKAGAMEVVLVRMCRAYNADNRTVFFEGKYGGMELFRALGCSELISSIFDFSHSLSALHFSEDEIALYTALVLINAHRPGLQEKRKVEQLQYNLELAFHHHLCKTHRQSILAKLPPKGKLRSLCSQHVERLQIFQHLHPIVVQAAFPPLYKELFSTETESPVGLSK

SEQ ID NO: 15587 - protein, 1687 aa, Homo Sapiens
MTSSSPAGLEGSDLSSINTMMSAVMSVGKVTENGGSPQGIKSPSKPPGPNRIGRRNQETKEEKSSYNCPLCEKICTTQHQLTMHIRQHNTDTGGADHSCSICGKSLSSASSLDRHMLVHSGERPYKCTVCGQSFTTNGNMHRHMKIHEKDPNSATATAPPSPLKRRRLSSKRKLSHDAESEREDPAPAKKMVEDGQSGDLEKKADEVFHCPVCFKEFVCKYGLETHMETHSDNPLRCDICCVTFRTHRGLLRHNALVHKQLPRDAMGRPFIQNNPSIPAGFHDLGFTDFSCRKFPRISQAWCETNLRRCISEQHRFVCDTCDKAFPMLCSLALHKQTHVAADQGQEKPQATPLPGDALDQKGFLALLGLQHTKDVRPAPAEEPLPDDNQAIQLQTLKCQLPQDPGCTNLLSLSPFEAASLGGSLTVLPATKDSIKHLSLQPFQKGFIIQPDSSIVVKPISGESAIELADIQQILKMAASAPPQISLPPFSKAPAAPLQAIFKHMPPLKPKPLVTPRTVVATSTPPPLINAQQASPGCISPSLPPPPLKLLKGSVEAASNAHLLQSKSGTQPHAATRLSLQQPRAELPGQPEMKTQLEQDSIIEALLPLSMEAKIKQEITEGELKAFMTAPGGKKTPAMRKVLYPCRFCNQVFAFSGVLRAHVRSHLGISPYQCNICDYIAADKAALIRHLRTHSGERPYICKICHYPFTVKANCERHLRKKHLKATRKDIEKNIEYVSSSAAELVDAFCAPDTVCRLCGEDLKHYRALRIHMRTHCGRGLGGGHKGRKPFECKECSAAFAAKRNCIHHILKQHLHVPEQDIESYVLAADGLGPAEAPAAEASGRGEDSGCAALGDCKPLTAFLEPQNGFLHRGPTQPPPPHVSIKLEPASSFAVDFNEPLDFSQKGLALVQVKQENISFLSPSSLVPYDCSMEPIDLSIPKNFRKGDKDLATPSEAKKPEEEAGSSEQPSPCPAPGPSLPVTLGPSGILESPMAPAPAATPEPPAQPLQGPVQLAVPIYSSALVSSPPLVGSSALLSGTALLRPLRPKPPLLLPKPPVTEELPPLASIAQIISSVSSAPTLLKTKVADPGPASTGSNTTASDSLGGSVPKAATTATPAATTSPKESSEPPAPASSPEAASPTEQGPAGTSKKRGRKRGMRSRPRANSGGVDLDSSGEFASIEKMLATTDTNKFSPFLQTAEDNTQDEVAGAPADHHGPSDEEQGSPPEDKLLRAKRNSYTNCLQKITCPHCPRVFPWASSLQRHMLTHTDSQSDAETAAAAGEVLDLTSRDREQPSEGATELRQVAGDAPVEQATAETASPVHREEHGRGESHEPEEEHGTEESTGDADGAEEDASSNQSLDLDFATKLMDFKLAEGDGEAGAGGAASQEQKLACDTCGKSFKFLGTLSRHRKAHGRQEPKDEKGDGASTAEEGPQPAPEQEEKPPETPAEVVESAPGAGEAPAEKLAEETEGPSDGESAAEKRSSEKSDDDKKPKTDSPKSVASKADKRKKVCSVCNKRFWSLQDLTRHMRSHTGERPYKCQTCERTFTLKHSLVRHQRIHQKARHAKHHGKDSDKEERGEEDSENESTHSGNNAVSENEAELAPNASNHMAVTRSRKEGLASATKDCSHREEKVTAGWPSEPGQGDLNPESPAALGQDLLEPRSKRPAHPILATADGASQLVGME

SEQ ID NO: 15588 - protein, 453 aa, Homo Sapiens
MRIPVDASTSRRFTPPSTALSPGKMSEALPLGAPDAGAALAGKLRSGDRSMVEVLADHPGELVRTDSPNFLCSVLPTHWRCNKTLPIAFKVVALGDVPDGTLVTVMAGNDENYSAELRNATAAMKNQVARFNDLRFVGRSGRGKSFTLTITVFTNPPQVATYHRAIKITVDGPREPRRHRQKLDDQTKPGSLSFSERLSELEQLRRTAMRVSPHHPAPTPNPRASLNHSTAFNPQPQSQMQDTRQIQPSPPWSYDQSYQYLGSIASPSVHPATPISPGRASGMTTLSAELSSRLSTAPDLTAFSDPRQFPALPSISDPRMHYPGAFTYSPTPVTSGIGIGMSAMGSATRYHTYLPPPYPGSSQAQGGPFQASSPSYHLYYGASAGSYQFSMVGGERSPPRILPPCTNASTGSALLNPSLPNQSDVVEAEGSHSNSPTNMAPSARLEEAVWRPY

SEQ ID NO: 15589 - protein, 604 aa, Homo Sapiens
MISVKRNTWRALSLVIGDCRKKGNFEYCQDRTEKHSTMPDSPVDVKTQSRLTPPTMPPPPTTQGAPRTSSFTPTTLTNGTSHSPTALNGAPSPPNGFSNGPSSSSSSSLANQQLPPACGARQLSKLKRFLTTLQQFGNDISPEIGERVRTLVLGLVNSTLTIEEFHSKLQEATNFPLRPFVIPFLKANLPLLQRELLHCARLAKQNPAQYLAQHEQLLLDASTTSPVDSSELLLDVNENGKRRTPDRTKENGFDREPLHSEHPSKRPCTISPGQRYSPNNGLSYQPNGLPHPTPPPPQHYRLDDMAIAHHYRDSYRHPSHRDLRDRNRPMGLHGTRQEEMIDHRLTDREWAEEWKHLDHLLNCIMDMVEKTRRSLTVLRRCQEADREELNYWIRRYSDAEDLKKGGGSSSSHSRQQSPVNPDPVALDAHREFLHRPASGYVPEEIWKKAEEAVNEVKRQAMTELQKAVSEAERKAHDMITTERAKMERTVAEAKRQAAEDALAVINQQEDSSESCWNCGRKASETCSGCNTARYCGSFCQHKDWEKHHHICGQTLQAQQQGDTPAVSSSVTPNSGAGSPMDTPPAATPRSTTPGTPSTIETTPR

SEQ ID NO: 15590 - protein, 521 aa, Homo Sapiens
MASNSLFSTVTPCQQNFFWDPSTSRRFSPPSSSLQPGKMSDVSPVVAAQQQQQQQQQQQQQQQQQQQQQQQEAAAAAAAAAAAAAAAAAVPRLRPPHDNRTMVEIIADHPAELVRTDSPNFLCSVLPSHWRCNKTLPVAFKVVALGEVPDGTVVTVMAGNDENYSAELRNASAVMKNQVARFNDLRFVGRSGRGKSFTLTITVFTNPPQVATYHRAIKVTVDGPREPRRHRQKLDDSKPSLFSDRLSDLGRIPHPSMRVGVPPQNPRPSLNSAPSPFNPQGQSQITDPRQAQSSPPWSYDQSYPSYLSQMTSPSIHSTTPLSSTRGTGLPAITDVPRRISDDDTATSDFCLWPSTLSKKSQAGASELGPFSDPRQFPSISSLTESRFSNPRMHYPATFTYTPPVTSGMSLGMSATTHYHTYLPPPYPGSSQSQSGPFQTSSTPYLYYGTSSGSYQFPMVPGGDRSPSRMLPPCTTTSNGSTLLNPNLPNQNDGVDADGSHSSSPTVLNSSGRMDESVWRPY

SEQ ID NO: 15591 - protein, 415 aa, Homo Sapiens
MRIPVDPSTSRRFTPPSPAFPCGGGGGKMGENSGALSAQAAVGPGGRARPEVRSMVDVLADHAGELVRTDSPNFLCSVLPSHWRCNKTLPVAFKVVALGDVPDGTVVTVMAGNDENYSAELRNASAVMKNQVARFNDLRFVGRSGRGKSFTLTITVFTNPTQVATYHRAIKVTVDGPREPRRHRQKLEDQTKPFPDRFGDLERLRMRVTPSTPSPRGSLSTTSHFSSQPQTPIQGTSELNPFSDPRQFDRSFPTLPTLTESRFPDPRMHYPGAMSAAFPYSATPSGTSISSLSVAGMPATSRFHHTYLPPPYPGAPQNQSGPFQANPSPYHLYYGTSSGSYQFSMVAGSSSGGDRSPTRMLASCTSSAASVAAGNLMNPSLGGQSDGVEADGSHSNSPTALSTPGRMDEAVWRPY

SEQ ID NO: 15592 - protein, 462 aa, Homo Sapiens
MDTKHFLPLDFSTQVNSSLTSPTGRGSMAAPSLHPSLGPGIGSPGQLHSPISTLSSPINGMGPPFSVISSPMGPHSMSVPTTPTLGFSTGSPQLSSPMNPVSSSEDIKPPLGLNGVLKVPAHPSGNMASFTKHICAICGDRSSGKHYGVYSCEGCKGFFKRTVRKDLTYTCRDNKDCLIDKRQRNRCQYCRYQKCLAMGMKREAVQEERQRGKDRNENEVESTSSANEDMPVERILEAELAVEPKTETYVEANMGLNPSSPNDPVTNICQAADKQLFTLVEWAKRIPHFSELPLDDQVILLRAGWNELLIASFSHRSIAVKDGILLATGLHVHRNSAHSAGVGAIFDRVLTELVSKMRDMQMDKTELGCLRAIVLFNPDSKGLSNPAEVEALREKVYASLEAYCKHKYPEQPGRFAKLLLRLPALRSIGLKCLEHLFFFKLIGDTPIDTFLMEMLEAPHQMT

SEQ ID NO: 15593 - protein, 533 aa, Homo Sapiens
MSWAARPPFLPQRHAAGQCGPVGVRKEMHCGVASRWRRRRPWLDPAAAAAAAVAGGEQQTPEPEPGEAGRDGMGDSGRDSRSPDSSSPNPLPQGVPPPSPPGPPLPPSTAPSLGGSGAPPPPPMPPPPLGSPFPVISSSMGSPGLPPPAPPGFSGPVSSPQINSTVSLPGGGSGPPEDVKPPVLGVRGLHCPPPPGGPGAGKRLCAICGDRSSGKHYGVYSCEGCKGFFKRTIRKDLTYSCRDNKDCTVDKRQRNRCQYCRYQKCLATGMKREAVQEERQRGKDKDGDGEGAGGAPEEMPVDRILEAELAVEQKSDQGVEGPGGTGGSGSSPNDPVTNICQAADKQLFTLVEWAKRIPHFSSLPLDDQVILLRAGWNELLIASFSHRSIDVRDGILLATGLHVHRNSAHSAGVGAIFDRVLTELVSKMRDMRMDKTELGCLRAIILFNPDAKGLSNPSEVEVLREKVYASLETYCKQKYPEQQGRFAKLLLRLPALRSIGLKCLEHLFFFKLIGDTPIDTFLMEMLEAPHQLA

SEQ ID NO: 15594 - protein, 463 aa, Homo Sapiens
MYGNYSHFMKFPAGYGGSPGHTGSTSMSPSAALSTGKPMDSHPSYTDTPVSAPRTLSAVGTPLNALGSPYRVITSAMGPPSGALAAPPGINLVAPPSSQLNVVNSVSSSEDIKPLPGLPGIGNMNYPSTSPGSLVKHICAICGDRSSGKHYGVYSCEGCKGFFKRTIRKDLIYTCRDNKDCLIDKRQRNRCQYCRYQKCLVMGMKREAVQEERQRSRERAESEAECATSGHEDMPVERILEAELAVEPKTESYGDMNMENSTNDPVTNICHAADKQLFTLVEWAKRIPHFSDLTLEDQVILLRAGWNELLIASFSHRSVSVQDGILLATGLHVHRSSAHSAGVGSIFDRVLTELVSKMKDMQMDKSELGCLRAIVLFNPDAKGLSNPSEVETLREKVYATLEAYTKQKYPEQPGRFAKLLLRLPALRSIGLKCLEHLFFFKLIGDTPIDTFLMEMLETPLQIT

SEQ ID NO: 15595 - protein, 1324 aa, Homo Sapiens
MSRRKQAKPQHFQSDPEVASLPRRDGDTEKGQPSRPTKSKDAHVCGRCCAEFFELSDLLLHKKNCTKNQLVLIVNENPASPPETFSPSPPPDNPDEQMNDTVNKTDQVDCSDLSEHNGLDREESMEVEAPVANKSGSGTSSGSHSSTAPSSSSSSSSSSGGGGSSSTGTSAITTSLPQLGDLTTLGNFSVINSNVIIENLQSTKVAVAQFSQEARCGGASGGKLAVPALMEQLLALQQQQIHQLQLIEQIRHQILLLASQNADLPTSSSPSQGTLRTSANPLSTLSSHLSQQLAAAAGLAQSLASQSASISGVKQLPPIQLPQSSSGNTIIPSNSGSSPNMNILAAAVTTPSSEKVASSAGASHVSNPAVSSSSSPAFAISSLLSPASNPLLPQQASANSVFPSPLPNIGTTAEDLNSLSALAQQRKSKPPNVTAFEAKSTSDEAFFKHKCRFCAKVFGSDSALQIHLRSHTGERPFKCNICGNRFSTKGNLKVHFQRHKEKYPHIQMNPYPVPEHLDNIPTSTGIPYGMSIPPEKPVTSWLDTKPVLPTLTTSVGLPLPPTLPSLIPFIKTEEPAPIPISHSATSPPGSVKSDSGGPESATRNLGGLPEEAEGSTLPPSGGKSEESGMVTNSVPTASSSVLSSPAADCGPAGSATTFTNPLLPLMSEQFKAKFPFGGLLDSAQASETSKLQQLVENIDKKATDPNECIICHRVLSCQSALKMHYRTHTGERPFKCKICGRAFTTKGNLKTHYSVHRAMPPLRVQHSCPICQKKFTNAVVLQQHIRMHMGGQIPNTPVPDSYSESMESDTGSFDEKNFDDLDNFSDENMEDCPEGSIPDTPKSADASQDSLSSSPLPLEMSSIAALENQMKMINAGLAEQLQASLKSVENGSIEGDVLTNDSSSVGGDMESQSAGSPAISESTSSMQALSPSNSTQEFHKSPSIEEKPQRAVPSEFANGLSPTPVNGGALDLTSSHAEKIIKEDSLGILFPFRDRGKFKNTACDICGKTFACQSALDIHYRSHTKERPFICTVCNRGFSTKGNLKQHMLTHQMRDLPSQLFEPSSNLGPNQNSAVIPANSLSSLIKTEVNGFVHVSPQDSKDTPTSHVPSGPLSSSATSPVLLPALPRRTPKQHYCNTCGKTFSSSSALQIHERTHTGEKPFACTICGRAFTTKGNLKVHMGTHMWNSTPARRGRRLSVDGPMTFLGGNPVKFPEMFQKDLAARSGSGDPSSFWNQYAAALSNGLAMKANEISVIQNGGIPPIPGSLGSGNSSPVSGLTGNLERLQNSEPNAPLAGLEKMASSENGTNFRFTRFVEDSKEIVTS

SEQ ID NO: 15596 - protein, 1007 aa, Homo Sapiens
MSRRKQRKPQQLISDCEGPSASENGDASEEDHPQVCAKCCAQFTDPTEFLAHQNACSTDPPVMVIIGGQENPNNSSASSEPRPEGHNNPQVMDTEHSNPPDSGSSVPTDPTWGPERRGEESPGHFLVAATGTAAGGGGGLILASPKLGATPLPPESTPAPPPPPPPPPPPGVGSGHLNIPLILEELRVLQQRQIHQMQMTEQICRQVLLLGSLGQTVGAPASPSELPGTGTASSTKPLLPLFSPIKPVQTSKTLASSSSSSSSSSGAETPKQAFFHLYHPLGSQHPFSAGGVGRSHKPTPAPSPALPGSTDQLIASPHLAFPSTTGLLAAQCLGAARGLEATASPGLLKPKNGSGELSYGEVMGPLEKPGGRHKCRFCAKVFGSDSALQIHLRSHTGERPYKCNVCGNRFTTRGNLKVHFHRHREKYPHVQMNPHPVPEHLDYVITSSGLPYGMSVPPEKAEEEAATPGGGVERKPLVASTTALSATESLTLLSTSAGTATAPGLPAFNKFVLMKAVEPKNKADENTPPGSEGSAISGVAESSTATRMQLSKLVTSLPSWALLTNHFKSTGSFPFPYVLEPLGASPSETSKLQQLVEKIDRQGAVAVTSAASGAPTTSAPAPSSSASSGPNQCVICLRVLSCPRALRLHYGQHGGERPFKCKVCGRAFSTRGNLRAHFVGHKASPAARAQNSCPICQKKFTNAVTLQQHVRMHLGGQIPNGGTALPEGGGAAQENGSEQSTVSGAGSFPQQQSQQPSPEEELSEEEEEEDEEEEEDVTDEDSLAGRGSESGGEKAISVRGDSEEASGAEEEVGTVAAAATAGKEMDSNEKTTQQSSLPPPPPPDSLDQPQPMEQGSSGVLGGKEEGGKPERSSSPASALTPEGEATSVTLVEELSLQEAMRKEPGESSSRKACEVCGQAFPSQAALEEHQKTHPKEGPLFTCVFCRQGFLERATLKKHMLLAHHQVQPFAPHGPQNIAALSLVPGCSPSITSTGLSPFPRKDDPTIP

SEQ ID NO: 15597 - protein, 1300 aa, Homo Sapiens
MSRRKQAKPQHLKSDEELLPPDGAPEHAAPGEGAEDADSGPESRSGGEETSVCEKCCAEFFKWADFLEHQRSCTKLPPVLIVHEDAPAPPPEDFPEPSPASSPSERAESEAAEEAGAEGAEGEARPVEKEAEPMDAEPAGDTRAPRPPPAAPAPPTPAYGAPSTNVTLEALLSTKVAVAQFSQGARAAGGSGAGGGVAAAAVPLILEQLMALQQQQIHQLQLIEQIRSQVALMQRPPPRPSLSPAAAPSAPGPAPSQLPGLAALPLSAGAPAAAIAGSGPAAPAAFEGAQPLSRPESGASTPGGPAEPSAPAAPSAAPAPAAPAPAPAPQSAASSQPQSASTPPALAPGSLLGAAPGLPSPLLPQTSASGVIFPNPLVSIAATANALDPLSALMKHRKGKPPNVSVFEPKASAEDPFFKHKCRFCAKVFGSDSALQIHLRSHTGERPFKCNICGNRFSTKGNLKVHFQRHKEKYPHIQMNPYPVPEYLDNVPTCSGIPYGMSLPPEKPVTTWLDSKPVLPTVPTSVGLQLPPTVPGAHGYADSPSATPASRSPQRPSPASSECASLSPGLNHVESGVSATAESPQSLLGGPPLTKAEPVSLPCTNARAGDAPVGAQASAAPTSVDGAPTSLGSPGLPAVSEQFKAQFPFGGLLDSMQTSETSKLQQLVENIDKKMTDPNQCVICHRVLSCQSALKMHYRTHTGERPFKCKICGRAFTTKGNLKTHFGVHRAKPPLRVQHSCPICQKKFTNAVVLQQHIRMHMGGQIPNTPLPEGFQDAMDSELAYDDKNAETLSSYDDDMDENSMEDDAELKDAATDPAKPLLSYAGSCPPSPPSVISSIAALENQMKMIDSVMSCQQLTGLKSVENGSGESDRLSNDSSSAVGDLESRSAGSPALSESSSSQALSPAPSNGESFRSKSPGLGAPEEPQEIPLKTERPDSPAAAPGSGGAPGRAGIKEEAPFSLLFLSRERGKCPSTVCGVCGKPFACKSALEIHYRSHTKERPFVCALCRRGCSTMGNLKQHLLTHRLKELPSQLFDPNFALGPSQSTPSLISSAAPTMIKMEVNGHGKAMALGEGPPLPAGVQVPAGPQTVMGPGLAPMLAPPPRRTPKQHNCQSCGKTFSSASALQIHERTHTGEKPFGCTICGRAFTTKGNLKVHMGTHMWNNAPARRGRRLSVENPMALLGGDALKFSEMFQKDLAARAMNVDPSFWNQYAAAITNGLAMKNNEISVIQNGGIPQLPVSLGGSALPPLGSMASGMDKARTGSSPPIVSLDKASSETAASRPFTRFIEDNKEIGIN

SEQ ID NO: 15598 - protein, 1053 aa, Homo Sapiens
MSRRKQAKPQHINSEEDQGEQQPQQQTPEFADAAPAAPAAGELGAPVNHPGNDEVASEDEATVKRLRREETHVCEKCCAEFFSISEFLEHKKNCTKNPPVLIMNDSEGPVPSEDFSGAVLSHQPTSPGSKDCHRENGGSSEDMKEKPDAESVVYLKTETALPPTPQDISYLAKGKVANTNVTLQALRGTKVAVNQRSADALPAPVPGANSIPWVLEQILCLQQQQLQQIQLTEQIRIQVNMWASHALHSSGAGADTLKTLGSHMSQQVSAAVALLSQKAGSQGLSLDALKQAKLPHANIPSATSSLSPGLAPFTLKPDGTRVLPNVMSRLPSALLPQAPGSVLFQSPFSTVALDTSKKGKGKPPNISAVDVKPKDEAALYKHKCKYCSKVFGTDSSLQIHLRSHTGERPFVCSVCGHRFTTKGNLKVHFHRHPQVKANPQLFAEFQDKVAAGNGIPYALSVPDPIDEPSLSLDSKPVLVTTSVGLPQNLSSGTNPKDLTGGSLPGDLQPGPSPESEGGPTLPGVGPNYNSPRAGGFQGSGTPEPGSETLKLQQLVENIDKATTDPNECLICHRVLSCQSSLKMHYRTHTGERPFQCKICGRAFSTKGNLKTHLGVHRTNTSIKTQHSCPICQKKFTNAVMLQQHIRMHMGGQIPNTPLPENPCDFTGSEPMTVGENGSTGAICHDDVIESIDVEEVSSQEAPSSSSKVPTPLPSIHSASPTLGFAMMASLDAPGKVGPAPFNLQRQGSRENGSVESDGLTNDSSSLMGDQEYQSRSPDILETTSFQALSPANSQAESIKSKSPDAGSKAESSENSRTEMEGRSSLPSTFIRAPPTYVKVEVPGTFVGPSTLSPGMTPLLAAQPRRQAKQHGCTRCGKNFSSASALQIHERTHTGEKPFVCNICGRAFTTKGNLKVHYMTHGANNNSARRGRKLAIENTMALLGTDGKRVSEIFPKEILAPSVNVDPVVWNQYTSMLNGGLAVKTNEISVIQSGGVPTLPVSLGATSVVNNATVSKMDGSQSGISADVEKPSATDGVPKHQFPHFLEENKIAVS

SEQ ID NO: 15599 - protein, 763 aa, Homo Sapiens; identical to SEQ ID NO: 11649

SEQ ID NO: 15600 - protein, 733 aa, Homo Sapiens
MERRSESPCLRDSPDRRSGSPDVKGPPPVKVARLEQNGSPMGARGRPNGAVAKAVGGLMIPVFCVVEQLDGSLEYDNREEHAEFVLVRKDVLFSQLVETALLALGYSHSSAAQAQGIIKLGRWNPLPLSYVTDAPDATVADMLQDVYHVVTLKIQLQSCSKLEDLPAEQWNHATVRNALKELLKEMNQSTLAKECPLSQSMISSIVNSTYYANVSATKCQEFGRWYKKYKKIKVERVERENLSDYCVLGQRPMHLPNMNQLASLGKTNEQSPHSQIHHSTPIRNQVPALQPIMSPGLLSPQLSPQLVRQQIAMAHLINQQIAVSRLLAHQHPQAINQQFLNHPPIPRAVKPEPTNSSVEVSPDIYQQVRDELKRASVSQAVFARVAFNRTQGLLSEILRKEEDPRTASQSLLVNLRAMQNFLNLPEVERDRIYQDERERSMNPNVSMVSSASSSPSSSRTPQAKTSTPTTDLPIKVDGANINITAAIYDEIQQEMKRAKVSQALFAKVAANKSQGWLCELLRWKENPSPENRTLWENLCTIRRFLNLPQHERDVIYEEESRHHHSERMQHVVQLPPEPVQVLHRQQSQPAKESSPPREEAPPPPPPTEDSCAKKPRSRTKISLEALGILQSFIHDVGLYPDQEAIHTLSAQLDLPKHTIIKFFQNQRYHVKHHGKLKEHLGSAVDVAEYKDEELLTESEENDSEEGSEEMYKVEAEEENADKSKAAPAEIDQR

SEQ ID NO: 15601 - protein, 1400 aa, Homo Sapiens
MMASFQRSNSHDKVRRIVAEEGRTARNLIAWSVPLESKDDDGKPKCQTGGKSKRTIQGTHKTTKQSTAVDCKITSSTTGDKHFDKSPTKTRHPRKIDLRARYWAFLFDNLRRAVDEIYVTCESDQSVVECKEVLMMLDNYVRDFKALIDWIQLQEKLEKTDAQSRPTSLAWEVKKMSPGRHVIPSPSTDRINVTSNARRSLNFGGSTGTVPAPRLAPTGVSWADKVKAHHTGSTASSEITPAQSCPPMTVQKASRKNERKDAEGWETVQRGRPIRSRSTAVMPKVSLATEATRSKDDSDKENVCLLPDESIQKGQFVGDGTSNTIESHPKDSLHSCDHPLAEKTQFTVSTLDDVKNSGSIRDNYVRTSEISAVHIDTECVSVMLQAGTPPLQVNEEKFPAEKARIENEMDPSDISNSMAEVLAKKEELADRLEKANEEAIASAIAEEEQLTREIEAEENNDINIETDNDSDFSASMGSGSVSFCGMSMDWNDVLADYEARESWRQNTSWGDIVEEEPARPPGHGIHMHEKLSSPSRKRTIAESKKKHEEKQMKAQQLREKLREEKTLKLQKLLEREKDVRKWKEELLDQRRRMMEEKLLHAEFKREVQLQAIVKKAQEEEAKVNEIAFINTLEAQNKRHDVLSKLKEYEQRLNELQEERQRRQEEKQARDEAVQERKRALEAERQARVEELLMKRKEQEARIEQQRQEKEKAREDAARERARDREERLAALTAAQQEAMEELQKKIQLKHDESIRRHMEQIEQRKEKAAELSSGRHANTDYAPKLTPYERKKQCSLCNVLISSEVYLFSHVKGRKHQQAVRENTSIQGRELSDEEVEHLSLKKYIIDIVVESTAPAEALKDGEERQKNKKKAKKIKARMNFRAKEYESLMETKNSGSDSPYKAKLQRLAKDLLKQVQVQDSGSWANNKVSALDRTLGEITRILEKENVADQIAFQAAGGLTALEHILQAVVPATNVNTVLRIPPKSLCNAINVYNLTCNNCSENCSDVLFSNKITFLMDLLIHQLTVYVPDENNTILGRNTNKQVFEGLTTGLLKVSAVVLGCLIANRPDGNCQPATPKIPTQEMKNKPSQGDPFNNRVQDLISYVVNMGLIDKLCACFLSVQGPVDENPKMAIFLQHAAGLLHAMCTLCFAVTGRSYSIFDNNRQDPTGLTAALQATDLAGVLHMLYCVLFHGTILDPSTASPKENYTQNTIQVAIQSLRFFNSFAALHLPAFQSIVGAEGLSLAFRHMASSLLGHCSQVSCESLLHEVIVCVGYFTVNHPDNQVIVQSGRHPTVLQKLCQLPFQYFSDPRLIKVLFPSLIAACYNNHQNKIILEQEMSCVLLATFIQDLAQTPGQAENQPYQPKGKCLGSQDYLELANRFPQQAWEEARQFFLKKEKK

SEQ ID NO: 15602 - protein, 348 aa, Homo Sapiens
MPRSFLVKKVKLDAFSSADLESAYGRARSDLGAPLHDKGYLSDYVGPSSVYDGDAEAALLKGPSPEPMYAAAVRGELGPAAAGSAPPPTPRPELATAAGGYINGDAAVSEGYAADAFFITDGRSRRKASNAGSAAAPSTASAAAPDGDAGGGGGAGGRSLGSGPGGRGGTRAGAGTEARAGPGAAGAGGRHACGECGKTYATSSNLSRHKQTHRSLDSQLARRCPTCGKVYVSMPAMAMHLLTHDLRHKCGVCGKAFSRPWLLQGHMRSHTGEKPFGCAHCGKAFADRSNLRAHMQTHSAFKHFQCKRCKKSFALKSYLNKHYESACFKGGAGGPAAPAPPQLSPVQA

SEQ ID NO: 15603 - protein, 307 aa, Homo Sapiens
MPRSFLVKKIKGDGFQCSGVPAPTYHPLETAYVLPGARGPPGDNGYAPHRLPPSSYDADQKPGLELAPAEPAYPPAAPEEYSDPESPQSSLSARYFRGEAAVTDSYSMDAFFISDGRSRRRRGGGGGDAGGSGDAGGAGGRAGRAGAQAGGGHRHACAECGKTYATSSNLSRHKQTHRSLDSQLARKCPTCGKAYVSMPALAMHLLTHNLRHKCGVCGKAFSRPWLLQGHMRSHTGEKPFGCAHCGKAFADRSNLRAHMQTHSAFKHYRCRQCDKSFALKSYLHKHCEAACAKAAEPPPPTPAGPAS

SEQ ID NO: 15604 - protein, 201 aa, Homo Sapiens
MSFATLRPAPPGRYLYPEVSPLSEDEDRGSDSSGSDEKPCRVHAARCGLQGARRRAGGRRAGGGGPGGRPGREPRQRHTANARERDRTNSVNTAFTALRTLIPTEPADRKLSKIETLRLASSYISHLGNVLLAGEACGDGQPCHSGPAFFHAARAGSPPPPPPPPPARDGENTQPKQICTFCLSNQRKLSKDRDRKTAIRS

SEQ ID NO: 15605 - protein, 216 aa, Homo Sapiens
MGGSGVGTAWHGPLARPSGTLPFASSMPSPVDASSADGGSGLGSHRRKRTTFSKGQLLELERAFAAWPYPNISTHEHLAWVTCLPEAKVQVWFQKRWAKIIKNRKSGILSPGSECPQSSCSLPDTLQQPWDPQMPGQPPPSSGTPQRTSVCRHSSCPAPGLSPRQGWEGAKAVAPWGSAGASEVHPSLERATPQTSLGSLSDLIYALAIVVNVDHS

SEQ ID NO: 15606 - protein, 1596 aa, Homo Sapiens
MESRETLSSSRQRGGESDFLPVSSAKPPAAPGCAGEPLLSTPGPGKGIPVGGERMEPEEEDELGSGRDVDSNSNADSEKWVAGDGLEEQEFSIKEANFTEGSLKLKIQTTKRAKKPPKNLENYICPPEIKITIKQSGDQKVSRAGKNSKATKEEERSHSKKKLLTASDLAASDLKGFQPQAYERPQKHSTLHYDTGLPQDFTGDTLKPKHQQKSSSQNHMDWSTNSDSGPVTQNCFISPESGRETASTSKIPALEPVASFAKAQGKKGSAGNTWSQLSNNNKDLLLGGVAPSPSSHSSPAPPSSSAECNGLQPLVDQDGGGTKEPPEPPTVGSKKKSSKKDVISQTIPNPDLDWVKNAQKAFDNTEGKREGYSADSAQEASPARQNVSSASNPENDSSHVRITIPIKAPSLDPTNHKRKKRQSIKAVVEKIMPEKALASGITMSSEVVNRILSNSEGNKKDPRVPKLSKMIENESPSVGLETGGNAEKVIPGGVSKPRKPPMVMTPPTCTDHSPSRKLPEIQHPKFAAKRRWTCSKPKPSTMLREAVMATSDKLMLEPPSAYPITPSSPLYTNTDSLTVITPVKKKRGRPKKQPLLTVETIHEGTSTSPVSPISREFPGTKKRKRRRNLAKLAQLVPGEDKPMSEMKFHKKVGKLGVLDKKTIKTINKMKTLKRKNILNQILSCSSSVALKAKAPPETSPGAAAIESKLGKQINVSKRGTIYIGKKRGRKPRAELPPPSEEPKTAIKHPRPVSSQPDVPAVPSNFQSLVASSPAAMHPLSTQLGGSNGNLSPASTETNFSELKTMPNLQPISALPTKTQKGIHSGTWKLSPPRLMANSPSHLCEIGSLKEITLSPVSESHSEETIPSDSGIGTDNNSTSDQAEKSSESRRRYSFDFCSLDNPEAIPSDTSTKNRHGHRQKHLIVDNFLAHESLKKPKHKRKRKSLQNRDDLQFLADLEELITKFQVFRISHRSYTFYHENPYPSIFRINFDHYYPVPYIQYDPLLYLRRTSDLKSKKKRGRPAKTNDTMTKVPFLQGFSYPIPSGSYYAPYGMPYTSMPMMNLGYYGQYPAPLYLSHTLGAASPFMRPTVPPPQFHTNSHVKMSGAAKHKAKHGVHLQGPVSMGLGDMQPSLNPPKVGSASLSSGRLHKRKHKHKHKHKEDRILGTHDNLSGLFAGKATGFSSHILSERLSSADKELPLVSEKNKHKEKQKHQHSEAGHKASKNNFEVDTLSTLSLSDAQHWTQAKEKGDLSSEPVDSCTKRYSGSGGDGGSTRSENLDVFSEMNPSNDKWDSDVSGSKRRSYEGFGTYREKDIQAFKMNRKERSSYDSSMSPGMPSPHLKVDQTAVHSKNEGSVPTMMTRKKPAAVDSVTIPPAPVLSLLAASAATSDAVGSSLKKRFKRREIEAIQCEVRKMCNYTKILSTKKNLDHVNKILKAKRLQRQSKTGNNFVKKRRGRPRKQPTQFDEDSRDQMPVLEKCIDLPSKRGQKPSLSPLVLEPAASQDTIMATIEAVIHMAREAPPLPPPPPPPLPPPPPPPLPPPPPLPKTPRGGKRKHKPQAPAQPPQQSPPQQPLPQEEEVKAKRQRKSRGSESEVLP

SEQ ID NO: 15607 - protein, 707 aa, Homo Sapiens
MSRDRFRSRGGGGGGFHRRGGGGGRGGLHDFRSPPPGMGLNQNRGPMGPGPGQSGPKPPIPPPPPHQQQQQPPPQQPPPQQPPPHQPPPHPQPHQQQQPPPPPQDSSKPVVAQGPGPAPGVGSAPPASSSAPPATPPTSGAPPGSGPGPTPTPPPAVTSAPPGAPPPTPPSSGVPTTPPQAGGPPPPPAAVPGPGPGPKQGPGPGGPKGGKMPGGPKPGGGPGLSTPGGHPKPPHRGGGEPRGGRQHHPPYHQQHHQGPPPGGPGGRSEEKISDSEGFKANLSLLRRPGEKTYTQRCRLFVGNLPADITEDEFKRLFAKYGEPGEVFINKGKGFGFIKLESRALAEIAKAELDDTPMRGRQLRVRFATHAAALSVRNLSPYVSNELLEEAFSQFGPIERAVVIVDDRGRSTGKGIVEFASKPAARKAFERCSEGVFLLTTTPRPVIVEPLEQLDDEDGLPEKLAQKNPMYQKERETPPRFAQHGTFEYEYSQRWKSLDEMEKQQREQVEKNMKDAKDKLESEMEDAYHEHQANLLRQDLMRRQEELRRMEELHNQEMQKRKEMQLRQEEERRRREEEMMIRQREMEEQMRRQREESYSRMGYMDPRERDMRMGGGGAMNMGDPYGSGGQKFPPLGGGGGIGYEANPGVPPATMSGSMMGSDMRTERFGQGGAGPVGGQGPRGMGPGTPAGYGRGREEYEGPNKKPRF

SEQ ID NO: 15608 - protein, 292 aa, Homo Sapiens
MEELTAFVSKSFDQKSKDGNGGGGGGGGKKDSITYREVLESGLARSRELGTSDSSLQDITEGGGHCPVHLFKDHVDNDKEKLKEFGTARVAEGIYECKEKREDVKSEDEDGQTKLKQRRSRTNFTLEQLNELERLFDETHYPDAFMREELSQRLGLSEARVQVWFQNRRAKCRKQENQMHKGVILGTANHLDACRVAPYVNMGALRMPFQQVQAQLQLEGVAHAHPHLHPHLAAHAPYLMFPPPPFGLPIASLAESASAAAVVAAAAKSNSKNSSIADLRLKARKHAEALGL

SEQ ID NO: 15609 - protein, 331 aa, Homo Sapiens
MEELTAFVSKSFDQKVKEKKEAITYREVLESGPLRGAKEPTGCTEAGRDDRSSPAVRAAGGGGGGGGGGGGGGGGGGVGGGGAGGGAGGGRSPVRELDMGAAERSREPGSPRLTEVSPELKDRKEDAKGMEDEGQTKIKQRRSRTNFTLEQLNELERLFDETHYPDAFMREELSQRLGLSEARVQVWFQNRRAKCRKQENQLHKGVLIGAASQFEACRVAPYVNVGALRMPFQQDSHCNVTPLSFQVQAQLQLDSAVAHAHHHLHPHLAAHAPYMMFPAPPFGLPLATLAADSASAASVVAAAAAAKTTSKNSSIADLRLKAKKHAAALGL

SEQ ID NO: 15610 - protein, 766 aa, Homo Sapiens
MKEKSKNAARTRREKENSEFYELAKLLPLPSAITSQLDKASIIRLTTSYLKMRVVFPEGLGEAWGHSSRTSPLDNVGRELGSHLLQTLDGFIFVVAPDGKIMYISETASVHLGLSQVELTGNSIYEYIHPADHDEMTAVLTAHQPYHSHFVQEYEIERSFFLRMKCVLAKRNAGLTCGGYKVIHCSGYLKIRQYSLDMSPFDGCYQNVGLVAVGHSLPPSAVTEIKLHSNMFMFRASLDMKLIFLDSRVAELTGYEPQDLIEKTLYHHVHGCDTFHLRCAHHLLLVKGQVTTKYYRFLAKHGGWVWVQSYATIVHNSRSSRPHCIVSVNYVLTDTEYKGLQLSLDQISASKPAFSYTSSSTPTMTDNRKGAKSRLSSSKSKSRTSPYPQYSGFHTERSESDHDSQWGGSPLTDTASPQLLDPADRPGSQHDASCAYRQFSDRSSLCYGFALDHSRLVEERHFHTQACEGGRCEAGRYFLGTPQAGREPWWGSRAALPLTKASPESREAYENSMPHIASVHRIHGRGHWDEDSVVSSPDPGSASESGDRYRTEQYQSSPHEPSKIETLIRATQQMIKEEENRLQLRKAPSDQLASINGAGKKHSLCFANYQQPPPTGEVCHGSALANTSPCDHIQQREGKMLSPHENDYDNSPTALSRISSPNSDRISKSSLILAKDYLHSDISPHQTAGDHPTVSPNCFGSHRQYFDKHAYTLTGYALEHLYDSETIRNYSLGCNGSHFDVTSHLRMQPDPAQGHKGTSVIITNGS

SEQ ID NO: 15611 - protein, 667 aa, Homo Sapiens
MKEKSKNAAKTRREKENGEFYELAKLLPLPSAITSQLDKASIIRLTTSYLKMRAVFPEGLGDAWGQPSRAGPLDGVAKELGSHLLQTLDGFVFVVASDGKIMYISETASVHLGLSQVELTGNSIYEYIHPSDHDEMTAVLTAHQPLHHHLLQEYEIERSFFLRMKCVLAKRNAGLTCSGYKVIHCSGYLKIRQYMLDMSLYDSCYQIVGLVAVGQSLPPSAITEIKLYSNMFMFRASLDLKLIFLDSRVTEVTGYEPQDLIEKTLYHHVHGCDVFHLRYAHHLLLVKGQVTTKYYRLLSKRGGWVWVQSYATVVHNSRSSRPHCIVSVNYVLTEIEYKELQLSLEQVSTAKSQDSWRTALSTSQETRKLVKPKNTKMKTKLRTNPYPPQQYSSFQMDKLECGQLGNWRASPPASAAAPPELQPHSESSDLLYTPSYSLPFSYHYGHFPLDSHVFSSKKPMLPAKFGQPQGSPCEVARFFLSTLPASGECQWHYANPLVPSSSSPAKNPPEPPANTARHSLVPSYEAPAAAVRRFGEDTAPPSFPSCGHYREEPALGPAKAARQAARDGARLALARAAPECCAPPTPEAPGAPAQLPFVLLNYHRVLARRGPLGGAAPAASGLACAPGGPEAATGALRLRHPSPAATSPPGAPLPHYLGASVIITNGR

SEQ ID NO: 15612 - protein, 284 aa, Homo Sapiens
MSMLPSFGFTQEQVACVCEVLQQGGNLERLGRFLWSLPACDHLHKNESVLKAKAVVAFHRGNFRELYKILESHQFSPHNHPKLQQLWLKAHYVEAEKLRGRPLGAVGKYRVRRKFPLPRTIWDGEETSYCFKEKSRGVLREWYAHNPYPSPREKRELAEATGLTTTQVSNWFKNRRQRDRAAEAKERENTENNNSSSNKQNQLSPLEGGKPLMSSSEEEFSPPQSPDQNSVLLLQGNMGHARSSNYSLPGLTASQPSHGLQTHQHQLQDSLLGPLTSSLVDLGS

SEQ ID NO: 15613 - protein, 291 aa, Homo Sapiens
MSMLPTFGFTQEQVACVCEVLQQGGNIERLGRFLWSLPACEHLHKNESVLKAKAVVAFHRGNFRELYKILESHQFSPHNHAKLQQLWLKAHYIEAEKLRGRPLGAVGKYRVRRKFPLPRSIWDGEETSYCFKEKSRSVLREWYAHNPYPSPREKRELAEATGLTTTQVSNWFKNRRQRDRAAEAKERENNENSNSNSHNPLNGSGKSVLGSSEDEKTPSGTPDHSSSSPALLLSPPPPGLPSLHSLGHPPGPSAVPVPVPGGGGADPLQHHHGLQDSILNPMSANLVDLGS

SEQ ID NO: 15614 - protein, 332 aa, Homo Sapiens
MVFRSPLDLYSSHFLLPNFADSHHRSILLASSGGGNGAGGGGGAGGGSGGGNGAGGGGAGGAGGGGGGGSRAPPEELSMFQLPTLNFSPEQVASVCETLEETGDIERLGRFLWSLPVAPGACEAINKHESILRARAVVAFHTGNFRDLYHILENHKFTKESHGKLQAMWLEAHYQEAEKLRGRPLGPVDKYRVRKKFPLPRTIWDGEQKTHCFKERTRSLLREWYLQDPYPNPSKKRELAQATGLTPTQVGNWFKNRRQRDRAAAAKNRLQHQAIGPSGMRSLAEPGCPTHGSAESPSTAASPTTSVSSLTERADTGTSILSVTSSDSECDV

SEQ ID NO: 15615 - protein, 781 aa, Homo Sapiens
MSSSSPTGQIASAADIKQENGMESASEGQEAHREVAGGAAVGLSPPAPAPFPLEPGDAATAAARVSGEEGAVAAAAAGAAADQVQLHSELLGRHHHAAAAAAQTPLAFSPDHVACVCEALQQGGNLDRLARFLWSLPQSDLLRGNESLLKARALVAFHQGIYPELYSILESHSFESANHPLLQQLWYKARYTEAERARGRPLGAVDKYRLRRKFPLPRTIWDGEETVYCFKEKSRNALKELYKQNRYPSPAEKRHLAKITGLSLTQVSNWFKNRRQRDRNPSETQSKSESDGNPSTEDESSKGHEDLSPHPLSSSSDGITNLSLSSHMEPVYMQQIGNAKISLSSSGVLLNGSLVPASTSPVFLNGNSFIQGPSGVILNGLNVGNTQAVALNPPKMSSNIVSNGISMTDILGSTSQDVKEFKVLQSSANSATTTSYSPSVPVSFPGLIPSTEVKREGIQTVASQDGGSVVTFTTPVQINQYGIVQIPNSGANSQFLNGSIGFSPLQLPPVSVAASQGNISVSSSTSDGSTFTSESTTVQQGKVFLSSLAPSAVVYTVPNTGQTIGSVKQEGLERSLVFSQLMPVNQNAQVNANLSSENISGSGLHPLASSLVNVSPTHNFSLSPSTLLNPTELNRDIADSQPMSAPVASKSTVTSVSNTNYATLQNCSLITGQDLLSVPMTQAALGEIVPTAEDQVGHPSPAVHQDFVQEHRLVLQSVANMKENFLSNSESKATSSLMMLDSKSKYVLDGMVDTVCEDLETDKKELAKLQTVQLDEDMQDL

SEQ ID NO: 15616 - protein, 739 aa, Homo Sapiens
MATLPAEPSAGPAAGGEAVAAAAATEEEEEEARQLLQTLQAAEGEAAAAAGAGAGAAAAGAEGPGSPGVPGSPPEAASEPPTGLRFSPEQVACVCEALLQAGHAGRLSRFLGALPPAERLRGSDPVLRARALVAFQRGEYAELYRLLESRPFPAAHHAFLQDLYLRARYHEAERARGRALGAVDKYRLRKKFPLPKTIWDGEETVYCFKERSRAALKACYRGNRYPTPDEKRRLATLTGLSLTQVSNWFKNRRQRDRTGAGGGAPCKSESDGNPTTEDESSRSPEDLERGAAPVSAEAAAQGSIFLAGTGPPAPCPASSSILVNGSFLAASGSPAVLLNGGPVIINGLALGEASSLGPLLLTGGGGAPPPQPSPQGASETKTSLVLDPQTGEVRLEEAQSEAPETKGAQVAAPGPALGEEVLGPLAQVVPGPPTAATFPLPPGPVPAVAAPQVVPLSPPPGYPTGLSPTSPLLNLPQVVPTSQVVTLPQAVGPLQLLAAGPGSPVKVAAAAGPANVHLINSGVGVTALQLPSATAPGNFLLANPVSGSPIVTGVALQQGKIILTATFPTSMLVSQVLPPAPGLALPLKPETAISVPEGGLPVAPSPALPEAHALGTLSAQQPPPAAATTSSTSLPFSPDSPGLLPNFPAPPPEGLMLSPAAVPVWSAGLELSAGTEGLLEAEKGLGTQAPHTVLRLPDPDPEGLLLGATAGGEVDEGLEAEAKVLTQLQSVPVEEPLEL

SEQ ID NO: 15617 - protein, 246 aa, Homo Sapiens
MFQLPILNFSPQQVAGVCETLEESGDVERLGRFLWSLPVAPAACEALNKNESVLRARAIVAFHGGNYRELYHILENHKFTKESHAKLQALWLEAHYQEAEKLRGRPLGPVDKYRVRKKFPLPRTIWDGEQKTHCFKERTRHLLREWYLQDPYPNPSKKRELAQATGLTPTQVGNWFKNRRQRDRAAAAKNRLQQQVLSQGSGRALRAEGDGTPEVLGVATSPAASLSSKAATSAISITSSDSECDI

SEQ ID NO: 15618 - protein, 728 aa, Homo Sapiens
MEAAAGGRGCFQPHPGLQKTLEQFHLSSMSSLGGPAAFSARWAQEAYKKESAKEAGAAAVPAPVPAATEPPPVLHLPAIQPPPPVLPGPFFMPSDRSTERCETVLEGETISCFVVGGEKRLCLPQILNSVLRDFSLQQINAVCDELHIYCSRCTADQLEILKVMGILPFSAPSCGLITKTDAERLCNALLYGGAYPPPCKKELAASLALGLELSERSVRVYHECFGKCKGLLVPELYSSPSAACIQCLDCRLMYPPHKFVVHSHKALENRTCHWGFDSANWRAYILLSQDYTGKEEQARLGRCLDDVKEKFDYGNKYKRRVPRVSSEPPASIRPKTDDTSSQSPAPSEKDKPSSWLRTLAGSSNKSLGCVHPRQRLSAFRPWSPAVSASEKELSPHLPALIRDSFYSYKSFETAVAPNVALAPPAQQKVVSSPPCAAAVSRAPEPLATCTQPRKRKLTVDTPGAPETLAPVAAPEEDKDSEAEVEVESREEFTSSLSSLSSPSFTSSSSAKDLGSPGARALPSAVPDAAAPADAPSGLEAELEHLRQALEGGLDTKEAKEKFLHEVVKMRVKQEEKLSAALQAKRSLHQELEFLRVAKKEKLREATEAKRNLRKEIERLRAENEKKMKEANESRLRLKRELEQARQARVCDKGCEAGRLRAKYSAQIEDLQVKLQHAEADREQLRADLLREREAREHLEKVVKELQEQLWPRARPEAAGSEGAAELEP

SEQ ID NO: 15619 - protein, 684 aa, Homo Sapiens
MENLQTNFSLVQGSTKKLNGMGDDGSPPAKKMITDIHANGKTINKVPTVKKEHLDDYGEAPVETDGEHVKRTCTSVPETLHLNPSLKHTLAQFHLSSQSSLGGPAAFSARHSQESMSPTVFLPLPSPQVLPGPLLIPSDSSTELTQTVLEGESISCFQVGGEKRLCLPQVLNSVLREFTLQQINTVCDELYIYCSRCTSDQLHILKVLGILPFNAPSCGLITLTDAQRLCNALLRPRTFPQNGSVLPAKSSLAQLKETGSAFEVEHECLGKCQGLFAPQFYVQPDAPCIQCLECCGMFAPQTFVMHSHRSPDKRTCHWGFESAKWHCYLHVNQKYLGTPEEKKLKIILEEMKEKFSMRSGKRNQSKTDAPSGMELQSWYPVIKQEGDHVSQTHSFLHPSYYLYMCDKVVAPNVSLTSAVSQSKELTKTEASKSISRQSEKAHSSGKLQKTVSYPDVSLEEQEKMDLKTSRELCSRLDASISNNSTSKRKSESATCNLVRDINKVGIGLVAAASSPLLVKDVICEDDKGKIMEEVMRTYLKQQEKLNLILQKKQQLQMEVKMLSSSKSMKELTEEQQNLQKELESLQNEHAQRMEEFYVEQKDLEKKLEQIMKQKCTCDSNLEKDKEAEYAGQLAELRQRLDHAEADRQELQDELRQEREARQKLEMMIKELKLQILKSSKTAKE

SEQ ID NO: 15620 - protein, 965 aa, Homo Sapiens
MALLCGLGQVTLRIWVSLPSQSENGIGFLAARAFLRSGGMEALTTQLGPGREGSSSPNSKQELQPYSGSSALKPNQVGETSLYGVPIVSLVIDGQERLCLAQISNTLLKNYSYNEIHNRRVALGITCVQCTPVQLEILRRAGAMPISSRRCGMITKREAERLCKSFLGEHKPPKLPENFAFDVVHECAWGSRGSFIPARYNSSRAKCIKCGYCSMYFSPNKFIFHSHRTPDAKYTQPDAANFNSWRRHLKLSDKSATDELSHAWEDVKAMFNGGTRKRTFSLQGGGGGGANGGSGGQGKGGAGGGGGGGPGCGAEMAPGPPPHKSLRCGEDEAAGPPGPPPPHPQRGLGLATGASGPAGPGGPGGGAGVRSYPVIPVPSKGFGLLQKLPPPLFPHPYGFPTAFGLCPKKDDPVLGAGEPKGGPGTGSGGGGAGTGGGAGGPGASHLPPGAGAGPGGGAMFWGHQPSGAAKDAAAVAAAAAAATVYPTFPMFWPAAGSLPVPSYPAAQSQAKAVAAAVAAAAAAAAAAAGSGAPEPLDGAEPAKESGLGAEERCPSALSRGPLDEDGTDEALPPPLAPLPPPPPPPARKGSYVSAFRPVVKDTESIAKLYGSAREAYGAGPARGPGPGAGSGGYVSPDFLSEGSSSYNSASPDVDTADEPEVDVESNRFPDDEDAQEETEPSAPSAGGGPDGEQPTGPPSATSSGADGPANSPDGGSPRPRRRLGPPPAGRPAFGDLAAEDLVRRPERSPPSGGGGYELREPCGPLGGPAPAKVFAPERDEHVKSAAVALGPAASYVCTPEAHEPDKEDNHSPADDLETRKSYPDQRSISQPSPANTDRGEDGLTLDVTGTHLVEKDIENLAREELQKLLLEQMELRKKLEREFQSLKDNFQDQMKRELAYREEMVQQLQIVRDTLCNELDQERKARYAIQQKLKEAHDALHHFSCKMLTPRHCTGNCSFKPPLLP

SEQ ID NO: 15621 - protein, 1001 aa, Homo Sapiens
MASSPLPGPNDILLASPSSAFQPDTLSQPRPGHANLKPNQVGQVILYGIPIVSLVIDGQERLCLAQISNTLLKNFSYNEIHNRRVALGITCVQCTPVQLEILRRAGAMPISSRRCGMITKREAERLCKSFLGENRPPKLPDNFAFDVSHECAWGCRGSFIPARYNSSRAKCIKCSYCNMYFSPNKFIFHSHRTPDAKYTQPDAANFNSWRRHLKLTDKSPQDELVFAWEDVKAMFNGGSRKRALPQPGAHPACHPLSSVKAAAVAAAAAVAGGGGLLGPHLLGAPPPPPPPPPPLAELAGAPHAHHKRPRFDDDDDSLQEAAVVAAASLSAAAASLSVAAASGGAGTGGGGAGGGCVAGVGVGAGAGAGAGAGAKGPRSYPVIPVPSKGSFGGVLQKFPGCGGLFPHPYTFPAAAAAFSLCHKKEDAGAAAEALGGAGAGGAGAAPKAGLSGLFWPAGRKDAFYPPFCMFWPPRTPGGLPVPTYLQPPPQPPSALGCALGESPALLRQAFLDLAEPGGAAGSAEAAPPPGQPPQVVANGPGSGPPPPAGGAGSRDALFESPPGGSGGDCSAGSTPPADSVAAAGAGAAAAGSGPAGSRVPAPHHPHLLEGRKAGGGSYHHSSAFRPVGGKDDAESLAKLHGASAGAPHSAQTHPHHHHHPHHHHHHHHPPQPPSPLLLLPPQPDEPGSERHHPAPPPPPPPPPPPPLAQHPHHRGLLSPGGTSCCYPSEDSSEDEDDEEEEQEVDVEGHKPPEGEEEEEGRDPDDDEEEDEETEVLLGDPLVGGGRFLQGRGPSEKGSSRDRAPAVAGAFPLGLNSSRLLQEDGKLGDPGSDLPPPPPPPLAPQKASGGGSSSPGSPVHHPSLEEQPSYKDSQKTKENNQVIVSTKDDNSFSDKNKEHSFFITDSDASGGDFWRERSGEHTQETNSPHSLKKDVENMGKEELQKVLFEQIDLRRRLEQEFQVLKGNTSFPVFNNFQDQMKRELAYREEMVQQLQIVSCIST

SEQ ID NO: 15622 - protein, 568 aa, Homo Sapiens
MLPGLAAAAAHRCSWSSLCRLRLRCRAAACNPSDRQEWQNLVTFGSFSNMVPCSHPYIGTLSQVKLYSTNVQKEGQGSQTLRVEKVPSFETAEGIGTELKAPLKQEPLQVRVKAVLKKREYGSKYTQNNFITGVRAINEFCLKSSDLEQLRKIRRRSPHEDTESFTVYLRSDVEAKSLEVWGSPEALAREKKLRKEAEIEYRERLFRNQKILREYRDFLGNTKPRSRTASVFFKGPGKVVMVAICINGLNCFFKFLAWIYTGSASMFSEAIHSLSDTCNQGLLALGISKSVQTPDPSHPYGFSNMRYISSLISGVGIFMMGAGLSWYHGVMGLLHPQPIESLLWAYCILAGSLVSEGATLLVAVNELRRNARAKGMSFYKYVMESRDPSTNVILLEDTAAVLGVIIAATCMGLTSITGNPLYDSLGSLGVGTLLGMVSAFLIYTNTEALLGRSIQPEQVQRLTELLENDPSVRAIHDVKATDLGLGKVRFKAEVDFDGRVVTRSYLEKQDFDQMLQEIQEVKTPEELETFMLKHGENIIDTLGAEVDRLEKELKKRNPEVRHVDLEIL

SEQ ID NO: 15623 - protein, 465 aa, Homo Sapiens
MNVTSLFSFTSPAVKRLLGWKQGDEEEKWAEKAVDALVKKLKKKKGAMEELEKALSCPGQPSNCVTIPRSLDGRLQVSHRKGLPHVIYCRVWRWPDLQSHHELKPLECCEFPFGSKQKEVCINPYHYKRVESPVLPPVLVPRHSEYNPQHSLLAQFRNLGQNEPHMPLNATFPDSFQQPNSHPFPHSPNSSYPNSPGSSSSTYPHSPTSSDPGSPFQMPADTPPPAYLPPEDPMTQDGSQPMDTNMMAPPLPSEINRGDVQAVAYEEPKHWCSIVYYELNNRVGEAFHASSTSVLVDGFTDPSNNKNRFCLGLLSNVNRNSTIENTRRHIGKGVHLYYVGGEVYAECLSDSSIFVQSRNCNYHHGFHPTTVCKIPSGCSLKIFNNQEFAQLLAQSVNHGFETVYELTKMCTIRMSFVKGWGAEYHRQDVTSTPCWIEIHLHGPLQWLDKVLTQMGSPHNPISSVS

SEQ ID NO: 15624 - protein, 467 aa, Homo Sapiens
MSSILPFTPPVVKRLLGWKKSAGGSGGAGGGEQNGQEEKWCEKAVKSLVKKLKKTGRLDELEKAITTQNCNTKCVTIPSTCSEIWGLSTPNTIDQWDTTGLYSFSEQTRSLDGRLQVSHRKGLPHVIYCRLWRWPDLHSHHELKAIENCEYAFNLKKDEVCVNPYHYQRVETPVLPPVLVPRHTEILTELPPLDDYTHSIPENTNFPAGIEPQSNYIPETPPPGYISEDGETSDQQLNQSMDTGSPAELSPTTLSPVNHSLDLQPVTYSEPAFWCSIAYYELNQRVGETFHASQPSLTVDGFTDPSNSERFCLGLLSNVNRNATVEMTRRHIGRGVRLYYIGGEVFAECLSDSAIFVQSPNCNQRYGWHPATVCKIPPGCNLKIFNNQEFAALLAQSVNQGFEAVYQLTRMCTIRMSFVKGWGAEYRRQTVTSTPCWIELHLNGPLQWLDKVLTQMGSPSVRCSSMS

SEQ ID NO: 15625 - protein, 425 aa, Homo Sapiens
MSSILPFTPPIVKRLLGWKKGEQNGQEEKWCEKAVKSLVKKLKKTGQLDELEKAITTQNVNTKCITIPRSLDGRLQVSHRKGLPHVIYCRLWRWPDLHSHHELRAMELCEFAFNMKKDEVCVNPYHYQRVETPVLPPVLVPRHTEIPAEFPPLDDYSHSIPENTNFPAGIEPQSNIPETPPPGYLSEDGETSDHQMNHSMDAGSPNLSPNPMSPAHNNLDLQPVTYCEPAFWCSISYYELNQRVGETFHASQPSMTVDGFTDPSNSERFCLGLLSNVNRNAAVELTRRHIGRGVRLYYIGGEVFAECLSDSAIFVQSPNCNQRYGWHPATVCKIPPGCNLKIFNNQEFAALLAQSVNQGFEAVYQLTRMCTIRMSFVKGWGAEYRRQTVTSTPCWIELHLNGPLQWLDKVLTQMGSPSIRCSSVS

SEQ ID NO: 15626 - protein, 552 aa, Homo Sapiens
MDNMSITNTPTSNDACLSIVHSLMCHRQGGESETFAKRAIESLVKKLKEKKDELDSLITAITTNGAHPSKCVTIQRTLDGRLQVAGRKGFPHVIYARLWRWPDLHKNELKHVKYCQYAFDLKCDSVCVNPYHYERVVSPGIDLSGLTLQSNAPSSMMVKDEYVHDFEGQPSLSTEGHSIQTIQHPPSNRASTETYSTPALLAPSESNATSTANFPNIPVASTSQPASILGGSHSEGLLQIASGPQPGQQQNGFTGQPATYHHNSTTTWTGSRTAPYTPNLPHHQNGHLQHHPPMPPHPGHYWPVHNELAFQPPISNHPAPEYWCSIAYFEMDVQVGETFKVPSSCPIVTVDGYVDPSGGDRFCLGQLSNVHRTEAIERARLHIGKGVQLECKGEGDVWVRCLSDHAVFVQSYYLDREAGRAPGDAVHKIYPSAYIKVFDLRQCHRQMQQQAATAQAAAAAQAAAVAGNIPGPGSVGGIAPAISLSAAAGIGVDDLRRLCILRMSFVKGWGPDYPRQSIKETPCWIEIHLHRALQLLDEVLHTMPIADPQPLD

SEQ ID NO: 15627 - protein, 465 aa, Homo Sapiens
MTSMASLFSFTSPAVKRLLGWKQGDEEEKWAEKAVDALVKKLKKKKGAMEELEKALSSPGQPSKCVTIPRSLDGRLQVSHRKGLPHVIYCRVWRWPDLQSHHELKPLDICEFPFGSKQKEVCINPYHYKRVESPVLPPVLVPRHNEFNPQHSLLVQFRNLSHNEPHMPQNATFPDSFHQPNNTPFPLSPNSPYPPSPASSTYPNSPASSGPGSPFQLPADTPPPAYMPPDDQMGQDNSQPMDTSNNMIPQIMPSISSRDVQPVAYEEPKHWCSIVYYELNNRVGEAFHASSTSVLVDGFTDPSNNKSRFCLGLLSNVNRNSTIENTRRHIGKGVHLYYVGGEVYAECLSDSSIFVQSRNCNFHHGFHPTTVCKIPSSCSLKIFNNQEFAQLLAQSVNHGFEAVYELTKMCTIRMSFVKGWGAEYHRQDVTSTPCWIEIHLHGPLQWLDKVLTQMGSPLNPISSVS

SEQ ID NO: 15628 - protein, 496 aa, Homo Sapiens
MFRSKRSGLVRRLWRSRVVPDREEGGSGGGGGGDEDGSLGSRAEPAPRAREGGGCGRSEVRPVAPRRPRDAVGQRGAQGAGRRRRAGGPPRPMSEPGAGAGSSLLDVAEPGGPGWLPESDCETVTCCLFSERDAAGAPRDASDPLAGAALEPAGGGRSREARSRLLLLEQELKTVTYSLLKRLKERSLDTLLEAVESRGGVPGGCVLVPRADLRLGGQPAPPQLLLGRLFRWPDLQHAVELKPLCGCHSFAAAADGPTVCCNPYHFSRLCGPESPPPPYSRLSPRDEYKPLDLSDSTLSYTETEATNSLITAPGEFSDASMSPDATKPSHWCSVAYWEHRTRVGRLYAVYDQAVSIFYDLPQGSGFCLGQLNLEQRSESVRRTRSKIGFGILLSKEPDGVWAYNRGEHPIFVNSPTLDAPGGRALVVRKVPPGYSIKVFDFERSGLQHAPEPDAADGPYDPNSVRISFAKGWGPCYSRQFITSCPCWLEILLNNPR

SEQ ID NO: 15629 - protein, 426 aa, Homo Sapiens
MFRTKRSALVRRLWRSRAPGGEDEEEGAGGGGGGGELRGEGATDSRAHGAGGGGPGRAGCCLGKAVRGAKGHHHPHPPAAGAGAAGGAEADLKALTHSVLKKLKERQLELLLQAVESRGGTRTACLLLPGRLDCRLGPGAPAGAQPAQPPSSYSLPLLLCKVFRWPDLRHSSEVKRLCCCESYGKINPELVCCNPHHLSRLCELESPPPPYSRYPMDFLKPTADCPDAVPSSAETGGTNYLAPGGLSDSQLLLEPGDRSHWCVVAYWEEKTRVGRLYCVQEPSLDIFYDLPQGNGFCLGQLNSDNKSQLVQKVRSKIGCGIQLTREVDGVWVYNRSSYPIFIKSATLDNPDSRTLLVHKVFPGFSIKAFDYEKAYSLQRPNDHEFMQQPWTGFTVQISFVKGWGQCYTRQFISSCPCWLEVIFNSR

SEQ ID NO: 15630 - protein, 467 aa, Homo Sapiens
MHSTTPISSLFSFTSPAVKRLLGWKQGDEEEKWAEKAVDSLVKKLKKKKGAMDELERALSCPGQPSKCVTIPRSLDGRLQVSHRKGLPHVIYCRVWRWPDLQSHHELKPLECCEFPFGSKQKEVCINPYHYRRVETPVLPPVLVPRHSEYNPQLSLLAKFRSASLHSEPLMPHNATYPDSFQQPPCSALPPSPSHAFSQSPCTASYPHSPGSPSEPESPYQHSVDTPPLPYHATEASETQSGQPVDATADRHVVLSIPNGDFRPVCYEEPQHWCSVAYYELNNRVGETFQASSRSVLIDGFTDPSNNRNRFCLGLLSNVNRNSTIENTRRHIGKGVHLYYVGGEVYAECVSDSSIFVQSRNCNYQHGFHPATVCKIPSGCSLKVFNNQLFAQLLAQSVHHGFEVVYELTKMCTIRMSFVKGWGAEYHRQDVTSTPCWIEIHLHGPLQWLDKVLTQMGSPHNPISSVS

SEQ ID NO: 15631 - protein, 1054 aa, Homo Sapiens
MEQDTAAVAATVAAADATATIVVIEDEQPGPSTSQEEGAAAAATEATAATEKGEKKKEKNVSSFQLKLAAKAPKSEKEMDPEYEEKMKADRAKRFEFLLKQTELFAHFIQPSAQKSPTSPLNMKLGRPRIKKDEKQSLISAGDYRHRRTEQEEDEELLSESRKTSNVCIRFEVSPSYVKGGPLRDYQIRGLNWLISLYENGVNGILADEMGLGKTLQTIALLGYLKHYRNIPGPHMVLVPKSTLHNWMNEFKRWVPSLRVICFVGDKDARAAFIRDEMMPGEWDVCVTSYEMVIKEKSVFKKFHWRYLVIDEAHRIKNEKSKLSEIVREFKSTNRLLLTGTPLQNNLHELWALLNFLLPDVFNSADDFDSWFDTKNCLGDQKLVERLHAVLKPFLLRRIKTDVEKSLPPKKEIKIYLGLSKMQREWYTKILMKDIDVLNSSGKMDKMRLLNILMQLRKCCNHPYLFDGAEPGPPYTTDEHIVSNSGKMVVLDKLLAKLKEQGSRVLIFSQMTRLLDILEDYCMWRGYEYCRLDGQTPHEEREDKFLEVEFLGQREAIEAFNAPNSSKFIFMLSTRAGGLGINLASADVVILYDSDWNPQVDLQAMDRAHRIGQKKPVRVFRLITDNTVEERIVERAEIKLRLDSIVIQQGRLIDQQSNKLAKEEMLQMIRHGATHVFASKESELTDEDITTILERGEKKTAEMNERLQKMGESSLRNFRMDIEQSLYKFEGEDYREKQKLGMVEWIEPPKRERKANYAVDAYFREALRVSEPKIPKAPRPPKQPNVQDFQFFPPRLFELLEKEILYYRKTIGYKVPRNPDIPNPALAQREEQKKIDGAEPLTPEETEEKEKLLTQGFTNWTKRDFNQFIKANEKYGRDDIDNIAREVEGKSPEEVMEYSAVFWERCNELQDIEKIMAQIERGEARIQRRISIKKALDAKIARYKAPFHQLRIQYGTSKGKNYTEEEDRFLICMLHKMGFDRENVYEELRQCVRNAPQFRFDWFIKSRTAMEFQRRCNTLISLIEKENMEIEERERAEKKKRATKTPMVKFSAFS

SEQ ID NO: 15632 - protein, 1590 aa, Homo Sapiens; identical to SEQ ID NO: 12546

SEQ ID NO: 15633 - protein, 1647 aa, Homo Sapiens
MSTPDPPLGGTPRPGPSPGPGPSPGAMLGPSPGPSPGSAHSMMGPSPGPPSAGHPIPTQGPGGYPQDNMHQMHKPMESMHEKGMSDDPRYNQMKGMGMRSGGHAGMGPPPSPMDQHSQGYPSPLGGSEHASSPVPASGPSSGPQMSSGPGGAPLDGADPQALGQQNRGPTPFNQNQLHQLRAQIMAYKMLARGQPLPDHLQMAVQGKRPMPGMQQQMPTLPPPSVSATGPGPGPGPGPGPGPGPAPPNYSRPHGMGGPNMPPPGPSGVPPGMPGQPPGGPPKPWPEGPMANAAAPTSTPQKLIPPQPTGRPSPAPPAVPPAASPVMPPQTQSPGQPAQPAPMVPLHQKQSRITPIQKPRGLDPVEILQEREYRLQARIAHRIQELENLPGSLAGDLRTKATIELKALRLLNFQRQLRQEVVVCMRRDTALETALNAKAYKRSKRQSLREARITEKLEKQQKIEQERKRRQKHQEYLNSILQHAKDFKEYHRSVTGKIQKLTKAVATYHANTEREQKKENERIEKERMRRLMAEDEEGYRKLIDQKKDKRLAYLLQQTDEYVANLTELVRQHKAAQVAKEKKKKKKKKKAENAEGQTPAIGPDGEPLDETSQMSDLPVKVIHVESGKILTGTDAPKAGQLEAWLEMNPGYEVAPRSDSEESGSEEEEEEEEEEQPQAAQPPTLPVEEKKKIPDPDSDDVSEVDARHIIENAKQDVDDEYGVSQALARGLQSYYAVAHAVTERVDKQSALMVNGVLKQYQIKGLEWLVSLYNNNLNGILADEMGLGKTIQTIALITYLMEHKRINGPFLIIVPLSTLSNWAYEFDKWAPSVVKVSYKGSPAARRAFVPQLRSGKFNVLLTTYEYIIKDKHILAKIRWKYMIVDEGHRMKNHHCKLTQVLNTHYVAPRRLLLTGTPLQNKLPELWALLNFLLPTIFKSCSTFEQWFNAPFAMTGEKVDLNEEETILIIRRLHKVLRPFLLRRLKKEVEAQLPEKVEYVIKCDMSALQRVLYRHMQAKGVLLTDGSEKDKKGKGGTKTLMNTIMQLRKICNHPYMFQHIEESFSEHLGFTGGIVQGLDLYRASGKFELLDRILPKLRATNHKVLLFCQMTSLMTIMEDYFAYRGFKYLRLDGTTKAEDRGMLLKTFNEPGSEYFIFLLSTRAGGLGLNLQSADTVIIFDSDWNPHQDLQAQDRAHRIGQQNEVRVLRLCTVNSVEEKILAAAKYKLNVDQKVIQAGMFDQKSSSHERRAFLQAILEHEEQDESRHCSTGSGSASFAHTAPPPAGVNPDLEEPPLKEEDEVPDDETVNQMIARHEEEFDLFMRMDLDRRREEARNPKRKPRLMEEDELPSWIIKDDAEVERLTCEEEEEKMFGRGSRHRKEVDYSDSLTEKQWLKAIEEGTLEEIEEEVRQKKSSRKRKRDSDAGSSTPTTSTRSRDKDDESKKQKKRGRPPAEKLSPNPPNLTKKMKKIVDAVIKYKDSSSGRQLSEVFIQLPSRKELPEYYELIRKPVDFKKIKERIRNHKYRSLNDLEKDVMLLCQNAQTFNLEGSLIYEDSIVLQSVFTSVRQKIEKEDDSEGEESEEEEEGEEEGSESESRSVKVKIKLGRKEKAQDRLKGGRRRPSRGSRAKPVVSDDDSEEEQEEDRSGSGSEED

SEQ ID NO: 15634 - protein, 1052 aa, Homo Sapiens
MSSAAEPPPPPPPESAPSKPAASIASGGSNSSNKGGPEGVAAQAVASAASAGPADAEMEEIFDDASPGKQKEIQEPDPTYEEKMQTDRANRFEYLLKQTELFAHFIQPAAQKTPTSPLKMKPGRPRIKKDEKQNLLSVGDYRHRRTEQEEDEELLTESSKATNVCTRFEDSPSYVKWGKLRDYQVRGLNWLISLYENGINGILADEMGLGKTLQTISLLGYMKHYRNIPGPHMVLVPKSTLHNWMSEFKRWVPTLRSVCLIGDKEQRAAFVRDVLLPGEWDVCVTSYEMLIKEKSVFKKFNWRYLVIDEAHRIKNEKSKLSEIVREFKTTNRLLLTGTPLQNNLHELWSLLNFLLPDVFNSADDFDSWFDTNNCLGDQKLVERLHMVLRPFLLRRIKADVEKSLPPKKEVKIYVGLSKMQREWYTRILMKDIDILNSAGKMDKMRLLNILMQLRKCCNHPYLFDGAEPGPPYTTDMHLVTNSGKMVVLDKLLPKLKEQGSRVLIFSQMTRVLDILEDYCMWRNYEYCRLDGQTPHDERQDSINAYNEPNSTKFVFMLSTRAGGLGINLATADVVILYDSDWNPQVDLQAMDRAHRIGQTKTVRVFRFITDNTVEERIVERAEMKLRLDSIVIQQGRLVDQNLNKIGKDEMLQMIRHGATHVFASKESEITDEDIDGILERGAKKTAEMNEKLSKMGESSLRNFTMDTESSVYNFEGEDYREKQKIAFTEWIEPPKRERKANYAVDAYFREALRVSEPKAPKAPRPPKQPNVQDFQFFPPRLFELLEKEILFYRKTIGYKVPRNPELPNAAQAQKEEQLKIDEAESLNDEELEEKEKLLTQGFTNWNKRDFNQFIKANEKWGRDDIENIAREVEGKTPEEVIEYSAVFWERCNELQDIEKIMAQIERGEARIQRRISIKKALDTKIGRYKAPFHQLRISYGTNKGKNYTEEEDRFLICMLHKLGFDKENVYDELRQCIRNSPQFRFDWFLKSRTAMELQRRCNTLITLIERENMELEEKEKAEKKKRGPKPSTQKRKMDGAPDGRGRKKKLKL

SEQ ID NO: 15635 - protein, 1026 aa, Homo Sapiens
MNLFNLDRFRFEKRNKIEEAPEATPQPSQPGPSSPISLSAEEENAEGEVSRANTPDSDITEKTEDSSVPETPDNERKASISYFKNQRGIQYIDLSSDSEDVVSPNCSNTVQEKTFNKDTVIIVSEPSEDEESQGLPTMARRNDDISELEDLSELEDLKDAKLQTLKELFPQRSDNDLLKLIESTSTMDGAIAAALLMFGDAGGGPRKRKLSSSSEPYEEDEFNDDQSIKKTRLDHGEESNESAESSSNWEKQESIVLKLQKEFPNFDKQELREVLKEHEWMYTEALESLKVFAEDQDMQYVSQSEVPNGKEVSSRSQNYPKNATKTKLKQKFSMKAQNGFNKKRKKNVFNPKRVVEDSEYDSGSDVGSSLDEDYSSGEEVMEDGYKGKILHFLQDASIGELTLIPQCSQKKAQKITELRPFNSWEALFTKMSKTNGLSEDLIWHCKTLIQERDVVIRLMNKCEDISNKLTKQVTMLTGNGGGWNIEQPSILNQSLSLKPYQKVGLNWLALVHKHGLNGILADEMGLGKTIQAIAFLAYLYQEGNNGPHLIVVPASTIDNWLREVNLWCPTLKVLCYYGSQEERKQIRFNIHSRYEDYNVIVTTYNCAISSSDDRSLFRRLKLNYAIFDEGHMLKNMGSIRYQHLMTINANNRLLLTGTPVQNNLLELMSLLNFVMPHMFSSSTSEIRRMFSSKTKSADEQSIYEKERIAHAKQIIKPFILRRVKEEVLKQLPPKKDRIELCAMSEKQEQLYLGLFNRLKKSINNLEKNTEMCNVMMQLRKMANHPLLHRQYYTAEKLKEMSQLMLKEPTHCEANPDLIFEDMEVMTDFELHVLCKQYRHINNFQLDMDLILDSGKFRVLGCILSELKQKGDRVVLFSQFTMMLDILEVLLKHHQHRYLRLDGKTQISERIHLIDEFNTDMDIFVFLLSTKAGGLGINLTSANVVILHDIDCNPYNDKQAEDRCHRVGQTKEVLVIKLISQGTIEESMLKINQQKLKLEQDMTTVDEGDEGSMPADIATLLKTSMGL

SEQ ID NO: 15636 - protein, 954 aa, Homo Sapiens
MSLPLTEEQRKKIEENRQKALARRAEKLLAEQHQRTSSGTSIAGNPFQAKQGPSQNFPRESCKPVSHGVIFKQQNLSSSSNADQRPHDSHSFQAKGIWKKPEEMPTACPGHSPRSQMALTGISPPLAQSPPEVPKQQLLSYELGQGHAQASPEIRFTPFANPTHKPLAKPKSSQETPAHSSGQPPRDAKLEAKTAKASPSGQNISYIHSSSESVTPRTEGRLQQKSGSSVQKGVNSQKGKCVRNGDRFQVLIGYNAELIAVFKTLPSKNYDPDTKTWNFSMNDYSALMKAAQSLPTVNLQPLEWAYGSSESPSTSSEGQAGLPSAPSLSFVKGRCMLISRAYFEADISYSQDLIALFKQMDSRRYDVKTRKWSFLLEEHSKLIAKVRCLPQVQLDPLPTTLTLAFASQLKKTSLSLTPDVPEADLSEVDPKLVSNLMPFQRAGVNFAIAKGGRLLLADDMGLGKTIQAICIAAFYRKEWPLLVVVPSSVRFTWEQAFLRWLPSLSPDCINVVVTGKDRLTAGLINIVSFDLLSKLEKQLKTPFKVVIIDESHFLKNSRTARCRAAMPVLKVAKRVILLSGTPAMSRPAELYTQIIAVKPTFFPQFHAFGLRYCDAKRMPWGWDYSGSSNLGELKLLLEEAVMLRRLKSDVLSQLPAKQRKIVVIAPGRINARTRAALDAAAKEMTTKDKTKQQQKDALILFFNRTAEAKIPSVIEYILDLLESGREKFLVFAHHKVVLDAITQELERKHVQHIRIDGSTSSAEREDLCQQFQLSERHAVAVLSITAANMGLTFSSADLVVFAELFWNPGVLIQAEDRVHRIGQTSSVGIHYLVAKGTADDYLWPLIQEKIKVLAEAGLSETNFSEMTESTDYLYKDPKQQKIYDLFQKSFEKEGSDMELLEAAESFDPGSASGTSGSSSQNMGDTLDESSLTASPQKKRRFEFFDNWDSFTSPL

SEQ ID NO: 15637 - protein, 385 aa, Homo Sapiens
MMMMALSKTFGQKPVKFQLEDDGEFYMIGSEVGNYLRMFRGSLYKRYPSLWRRLATVEERKKIVASSHGKKTKPNTKDHGYTTLATSVTLLKASEVEEILDGNDEKYKAVSISTEPPTYLREQKAKRNSQWVPTLPNSSHHLDAVPCSTTINRNRMGRDKKRTFPLCFDDHDPAVIHENASQPEVLVPIRLDMEIDGQKLRDAFTWNMNEKLMTPEMFSEILCDDLDLNPLTFVPAIASAIRQQIESYPTDSILEDQSDQRVIIKLNIHVGNISLVDQFEWDMSEKENSPEKFALKLCSELGLGGEFVTTIAYSIRGQLSWHQKTYAFSENPLPTVEIAIRNTGDADQWCPLLETLTDAEMEKKIRDQDRNTRRMRRLANTAPAW

SEQ ID NO: 15638 - protein, 1105 aa, Homo Sapiens
MAAAAGGGGPGTAVGATGSGIAAAAAGLAVYRRKDGGPATKFWESPETVSQLDSVRVWLGKHYKKYVHADAPTNKTLAGLVVQLLQFQEDAFGKHVTNPAFTKLPAKCFMDFKAGGALCHILGAAYKYKNEQGWRRFDLQNPSRMDRNVEMFMNIEKTLVQNNCLTRPNIYLIPDIDLKLANKLKDIIKRHQGTFTDEKSKASHHIYPYSSSQDDEEWLRPVMRKEKQVLVHWGFYPDSYDTWVHSNDVDAEIEDPPIPEKPWKVHVKWILDTDIFNEWMNEEDYEVDENRKPVSFRQRISTKNEEPVRSPERRDRKASANARKRKHSPSPPPPTPTESRKKSGKKGQASLYGKRRSQKEEDEQEDLTKDMEDPTPVPNIEEVVLPKNVNLKKDSENTPVKGGTVADLDEQDEETVTAGGKEDEDPAKGDQSRSVDLGEDNVTEQTNHIIIPSYASWFDYNCIHVIERRALPEFFNGKNKSKTPEIYLAYRNFMIDTYRLNPQEYLTSTACRRNLTGDVCAVMRVHAFLEQWGLVNYQVDPESRPMAMGPPPTPHFNVLADTPSGLVPLHLRSPQVPAAQQMLNFPEKNKEKPVDLQNFGLRTDIYSKKTLAKSKGASAGREWTEQETLLLLEALEMYKDDWNKVSEHVGSRTQDECILHFLRLPIEDPYLENSDASLGPLAYQPVPFSQSGNPVMSTVAFLASVVDPRVASAAAKAALEEFSRVREEVPLELVEAHVKKVQEAARASGKVDPTYGLESSCIAGTGPDEPEKLEGAEEEKMEADPDGQQPEKAENKVENETDEGDKAQDGENEKNSEKEQDSEVSEDTKSEEKETEENKELTDTCKERESDTGKKKVEHEISEGNVATAAAAALASAATKAKHLAAVEERKIKSLVALLVETQMKKLEIKLRHFEELETIMDREKEALEQQRQQLLTERQNFHMEQLKYAELRARQQMEQQQHGQNPQQAHQHSGGPGLAPLGAAGHPGMMPHQQPPPYPLMHHQMPPPHPPQPGQIPGPGSMMPGQHMPGRMIPTVAANIHPSGSGPTPPGMPPMPGNILGPRVPLTAPNGMYPPPPQQQPPPPPPADGVPPPPAPGPPASAAP

SEQ ID NO: 15639 - protein, 1214 aa, Homo Sapiens
MAVRKKDGGPNVKYYEAADTVTQFDNVRLWLGKNYKKYIQAEPPTNKSLSSLVVQLLQFQEEVFGKHVSNAPLTKLPIKCFLDFKAGGSLCHILAAAYKFKSDQGWRRYDFQNPSRMDRNVEMFMTIEKSLVQNNCLSRPNIFLCPEIEPKLLGKLKDIIKRHQGTVTEDKNNASHVVYPVPGNLEEEEWVRPVMKRDKQVLLHWGYYPDSYDTWIPASEIEASVEDAPTPEKPRKVHAKWILDTDTFNEWMNEEDYEVNDDKNPVSRRKKISAKTLTDEVNSPDSDRRDKKGGNYKKRKRSPSPSPTPEAKKKNAKKGPSTPYTKSKRGHREEEQEDLTKDMDEPSPVPNVEEVTLPKTVNTKKDSESAPVKGGTMTDLDEQEDESMETTGKDEDENSTGNKGEQTKNPDLHEDNVTEQTHHIIIPSYAAWFDYNSVHAIERRALPEFFNGKNKSKTPEIYLAYRNFMIDTYRLNPQEYLTSTACRRNLAGDVCAIMRVHAFLEQWGLINYQVDAESRPTPMGPPPTSHFHVLADTPSGLVPLQPKTPQQTSASQQMLNFPDKGKEKPTDMQNFGLRTDMYTKKNVPSKSKAAASATREWTEQETLLLLEALEMYKDDWNKVSEHVGSRTQDECILHFLRLPIEDPYLEDSEASLGPLAYQPIPFSQSGNPVMSTVAFLASVVDPRVASAAAKSALEEFSKMKEEVPTALVEAHVRKVEEAAKVTGKADPAFGLESSGIAGTTSDEPERIEESGNDEARVEGQATDEKKEPKEPREGGGAIEEEAKEKTSEAPKKDEEKGKEGDSEKESEKSDGDPIVDPEKEKEPKEGQEEVLKEVVESEGERKTKVERDIGEGNLSTAAAAALAAAAVKAKHLAAVEERKIKSLVALLVETQMKKLEIKLRHFEELETIMDREREALEYQRQQLLADRQAFHMEQLKYAEMRARQQHFQQMHQQQQQPPPALPPGSQPIPPTGAAGPPAVHGLAVAPASVVPAPAGSGAPPGSLGPSEQIGQAGSTAGPQQQQPAGAPQPGAVPPGVPPPGPHGPSPFPNQQTPPSMMPGAVPGSGHPGVAGNAPLGLPFGMPPPPPPPAPSIIPFGSLADSISINLPAPPNLHGHHHHLPFAPGTLPPPNLPVSMANPLHPNLPATTTMPSSLPLGPGLGSAAAQSPAIVAAVQGNLLPSASPLPDPGTPLPPDPTAPSPGTVTPVPPPQ

SEQ ID NO: 15640 - protein, 515 aa, Homo Sapiens
MAARAGFQSVAPSGGAGASGGAGAAAALGPGGTPGPPVRMGPAPGQGLYRSPMPGAAYPRPGMLPGSRMTPQGPSMGPPGYGGNPSVRPGLAQSGMDQSRKRPAPQQIQQVQQQAVQNRNHNAKKKKMADKILPQRIRELVPESQAYMDLLAFERKLDQTIMRKRLDIQEALKRPIKQKRKLRIFISNTFNPAKSDAEDGEGTVASWELRVEGRLLEDSALSKYDATKQKRKFSSFFKSLVIELDKDLYGPDNHLVEWHRTATTQETDGFQVKRPGDVNVRCTVLLMLDYQPPQFKLDPRLARLLGIHTQTRPVIIQALWQYIKTHKLQDPHEREFVICDKYLQQIFESQRMKFSEIPQRLHALLMPPEPIIINHVISVDPNDQKKTACYDIDVEVDDTLKTQMNSFLLSTASQQEIATLDNKIHETIETINQLKTQREFMLSFARDPQGFINDWLQSQCRDLKTMTDVVGNPEEERRAEFYFQPWAQEAVCRYFYSKVQQRRQELEQALGIRNT

SEQ ID NO: 15641 - protein, 531 aa, Homo Sapiens
MSGRGAGGFPLPPLSPGGGAVAAALGAPPPPAGPGMLPGPALRGPGPAGGVGGPGAAAFRPMGPAGPAAQYQRPGMSPGNRMPMAGLQVGPPAGSPFGAAAPLRPGMPPTMMDPFRKRLLVPQAQPPMPAQRRGLKRRKMADKVLPQRIRELVPESQAYMDLLAFERKLDQTIARKRMEIQEAIKKPLTQKRKLRIYISNTFSPSKAEGDSAGTAGTPGGTPAGDKVASWELRVEGKLLDDPSKQKRKFSSFFKSLVIELDKELYGPDNHLVEWHRMPTTQETDGFQVKRPGDLNVKCTLLLMLDHQPPQYKLDPRLARLLGVHTQTRAAIMQALWLYIKHNQLQDGHEREYINCNRYFRQIFSCGRLRFSEIPMKLAGLLQHPDPIVINHVISVDPNDQKKTACYDIDVEVDDPLKAQMSNFLASTTNQQEIASLDVKIHETIESINQLKTQRDFMLSFSTDPQDFIQEWLRSQRRDLKIITDVIGNPEEERRAAFYHQPWAQEAVGRHIFAKVQQRRQELEQVLGIRLT

SEQ ID NO: 15642 - protein, 483 aa, Homo Sapiens
MAADEVAGGARKATKSKLFEFLVHGVRPGMPSGARMPHQGAPMGPPGSPYMGSPAVRPGLAPAGMEPARKRAAPPPGQSQAQSQGQPVPTAPARSRSAKRRKMADKILPQRIRELVPESQAYMDLLAFERKLDQTIMRKRVDIQEALKRPMKQKRKLRLYISNTFNPAKPDAEDSDGSIASWELRVEGKLLDDPSKQKRKFSSFFKSLVIELDKDLYGPDNHLVEWHRTPTTQETDGFQVKRPGDLSVRCTLLLMLDYQPPQFKLDPRLARLLGLHTQSRSAIVQALWQYVKTNRLQDSHDKEYINGDKYFQQIFDCPRLKFSEIPQRLTALLLPPDPIVINHVISVDPSDQKKTACYDIDVEVEEPLKGQMSSFLLSTANQQEISALDSKIHETIESINQLKIQRDFMLSFSRDPKGYVQDLLRSQSRDLKVMTDVAGNPEEERRAEFYHQPWSQEAVSRYFYCKIQQRRQELEQSLVVRNT

SEQ ID NO: 15643 - protein, 411 aa, Homo Sapiens
MSKRPSYAPPPTPAPATQMPSTPGFVGYNPYSHLAYNNYRLGGNPGTNSRVTASSGITIPKPPKPPDKPLMPYMRYSRKVWDQVKASNPDLKLWEIGKIIGGMWRDLTDEEKQEYLNEYEAEKIEYNESMKAYHNSPAYLAYINAKSRAEAALEEESRQRQSRMEKGEPYMSIQPAEDPDDYDDGFSMKHTATARFQRNHRLISEILSESVVPDVRSVVTTARMQVLKRQVQSLMVHQRKLEAELLQIEERHQEKKRKFLESTDSFNNELKRLCGLKVEVDMEKIAAEIAQAEEQARKRQEEREKEAAEQAERSQSSIVPEEEQAANKGEEKKDDENIPMETEETHLEETTESQQNGEEGTSTPEDKESGQEGVDSMAEEGTSDSNTGSESNSATVEEPPTDPIPEDEKKE

SEQ ID NO: 15644 - protein, 264 aa, Homo Sapiens
MPRSFLVRKPSDPNRKPNYSELQDSNPEFTFQQPYDQAHLLAAIPPPEILNPTASLPMLIWDSVLAPQAQPIAWASLRLQESPRVAELTSLSDEDSGKGSQPPSPPSPAPSSFSSTSVSSLEAEAYAAFPGLGQVPKQLAQLSEAKDLQARKAFNCKYCNKEYLSLGALKMHIRSHTLPCVCGTCGKAFSRPWLLQGHVRTHTGEKPFSCPHCSRAFADRSNLRAHLQTHSDVKKYQCQACARTFSRMSLLHKHQESGCSGCPR

SEQ ID NO: 15645 - protein, 268 aa, Homo Sapiens
MPRSFLVKKHFNASKKPNYSELDTHTVIISPYLYESYSMPVIPQPEILSSGAYSPITVWTTAAPFHAQLPNGLSPLSGYSSSLGRVSPPPPSDTSSKDHSGSESPISDEEERLQSKLSDPHAIEAEKFQCNLCNKTYSTFSGLAKHKQLHCDAQSRKSFSCKYCDKEYVSLGALKMHIRTHTLPCVCKICGKAFSRPWLLQGHIRTHTGEKPFSCPHCNRAFADRSNLRAHLQTHSDVKKYQCKNCSKTFSRMSLLHKHEESGCCVAH

SEQ ID NO: 15646 - protein, 292 aa, Homo Sapiens
MPRSFLVKTHSSHRVPNYRRLETQREINGACSACGGLVVPLLPRDKEAPSVPGDLPQPWDRSSAVACISLPLLPRIEEALGASGLDALEVSEVDPRASRAAIVPLKDSLNHLNLPPLLVLPTRWSPTLGPDRHGAPEKLLGAERMPRAPGGFECFHCHKPYHTLAGLARHRQLHCHLQVGRVFTCKYCDKEYTSLGALKMHIRTHTLPCTCKICGKAFSRPWLLQGHVRTHTGEKPYACSHCSRAFADRSNLRAHLQTHSDAKKYRCRRCTKTFSRMSLLARHEESGCCPGP

SEQ ID NO: 15647 - protein, 1469 aa, Homo Sapiens
MDVDAEREKITQEIKELERILDPGSSGSHVEISESSLESDSEADSLPSEDLDPADPPISEEERWGEASNDEDDPKDKTLPEDPETCLQLNMVYQEVIQEKLAEANLLLAQNREQQEELMRDLAGSKGTKVKDGKSLPPSTYMGHFMKPYFKDKVTGVGPPANEDTREKAAQGIKAFEELLVTKWKNWEKALLRKSVVSDRLQRLLQPKLLKLEYLHQKQSKVSSELERQALEKQGREAEKEIQDINQLPEEALLGNRLDSHDWEKISNINFEGSRSAEEIRKFWQNSEHPSINKQEWSREEEERLQAIAAAHGHLEWQKIAEELGTSRSAFQCLQKFQQHNKALKRKEWTEEEDRMLTQLVQEMRVGSHIPYRRIVYYMEGRDSMQLIYRWTKSLDPGLKKGYWAPEEDAKLLQAVAKYGEQDWFKIREEVPGRSDAQCRDRYLRRLHFSLKKGRWNLKEEEQLIELIEKYGVGHWAKIASELPHRSGSQCLSKWKIMMGKKQGLRRRRRRARHSVRWSSTSSSGSSSGSSGGSSSSSSSSSEEDEPEQAQAGEGDRALLSPQYMVPDMDLWVPARQSTSQPWRGGAGAWLGGPAASLSPPKGSSASQGGSKEASTTAAAPGEETSPVQVPARAHGPVPRSAQASHSADTRPAGAEKQALEGGRRLLTVPVETVLRVLRANTAARSCTQKEQLRQPPLPTSSPGVSSGDSVARSHVQWLRHRATQSGQRRWRHALHRRLLNRRLLLAVTPWVGDVVVPCTQASQRPAVVQTQADGLREQLQQARLASTPVFTLFTQLFHIDTAGCLEVVRERKALPPRLPQAGARDPPVHLLQASSSAQSTPGHLFPNVPAQEASKSASHKGSRRLASSRVERTLPQASLLASTGPRPKPKTVSELLQEKRLQEARAREATRGPVVLPSQLLVSSSVILQPPLPHTPHGRPAPGPTVLNVPLSGPGAPAAAKPGTSGSWQEAGTSAKDKRLSTMQALPLAPVFSEAEGTAPAASQAPALGPGQISVSCPESGLGQSQAPAASRKQGLPEAPPFLPAAPSPTPLPVQPLSLTHIGGPHVATSVPLPVTWVLTAQGLLPVPVPAVVSLPRPAGTPGPAGLLATLLPPLTETRAAQGPRAPALSSSWQPPANMNREPEPSCRTDTPAPPTHALSQSPAEADGSVAFVPGEAQVAREIPEPRTSSHADPPEAEPPWSGRLPAFGGVIPATEPRGTPGSPSGTQEPRGPLGLEKLPLRQPGPEKGALDLEKPPLPQPGPEKGALDLGLLSQEGEAATQQWLGGQRGVRVPLLGSRLPYQPPALCSLRALSGLLLHKKALEHKATSLVVGGEAERPAGALQASLGLVRGQLQDNPAYLLLRARFLAAFTLPALLATLAPQGVRTTLSVPSRVGSESEDEDLLSELELADRDGQPGCTTATCPIQGAPDSGKCSASSCLDTSNDPDDLDVLRTRHARHTRKRRRLV

SEQ ID NO: 15648 - protein, 328 aa, Homo Sapiens
MASRCSEPYPEVSRIPTVRGCNGSLSGALSCCEDSARGSGPPKAPTVAEGPSSCLRRNVISERERRKRMSLSCERLRALLPQFDGRREDMASVLEMSVQFLRLASALGPSQEQHAILASSKEMWHSLQEDVLQLTLSSQIQAGVPDPGTGASSGTRTPDVKAFLESPWSLDPASASPEPVPHILASSRQWDPASCTSLGTDKCEALLGLCQVRGGLPPFSEPSSLVPWPPGRSLPKAVRPPLSWPPFSQQQTLPVMSGEALGWLGQAGPLAMGAAPLGEPAKEDPMLAQEAGSALGSDVDDGTSFLLTAGPSSWPGEWGPGFRAGPPA

SEQ ID NO: 15649 - protein, 425 aa, Homo Sapiens
MASSIICQEHCQISGQAKIDILLVGDVTVGYLADTVQKLFANIAEVTITISDTKEAAALLDDCIFNMVLLKVPSSLSAEELEAIKLIRFGKKKNTHSLFVFIIPENFKGCISGHGMDIALTEPLTMEKMSNVVKYWTTCPSNTVKTENATGPEELGLPLQRSYSEHLGYFPTDLFACSESLRNGNGLELNASLSEFEKNKKISLLHSSKEKLRRERIKYCCEQLRTLLPYVKGRKNDAASVLEATVDYVKYIREKISPAVMAQITEALQSNMRFCKKQQTPIELSLPGTVMAQRENSVMSTYSPERGLQFLTNTCWNGCSTPDAESSLDEAVRVPSSSASENAIGDPYKTHISSAALSLNSLHTVRYYSKVTPSYDATAVTNQNISIHLPSAMPPVSKLLPRHCTSGLGQTCTTHPNCLQQFWAY

SEQ ID NO: 15650 - protein, 391 aa, Homo Sapiens
MYSMMMETDLHSPGGAQAPTNLSGPAGAGGGGGGGGGGGGGGGAKANQDRVKRPMNAFMVWSRGQRRKMAQENPKMHNSEISKRLGAEWKVMSEAEKRPFIDEAKRLRALHMKEHPDYKYRPRRKTKTLLKKDKYSLAGGLLAAGAGGGGAAVAMGVGVGVGAAAVGQRLESPGGAAGGGYAHVNGWANGAYPGSVAAAAAAAAMMQEAQLAYGQHPGAGGAHPHAHPAHPHPHHPHAHPHNPQPMHRYDMGALQYSPISNSQGYMSASPSGYGGLPYGAAAAAAAAAGGAHQNSAVAAAAAAAAASSGALGALGSLVKSEPSGSPPAPAHSRAPCPGDLREMISMYLPAGEGGDPAAAAAAAAQSRLHSLPQHYQGAGAGVNGTVPLTHI

SEQ ID NO: 15651 - protein, 466 aa, Homo Sapiens
MAEEQDLSEVELSPVGSEEPRCLSPGSAPSLGPDGGGGGSGLRASPGPGELGKVKKEQQDGEADDDKFPVCIREAVSQVLSGYDWTLVPMPVRVNGASKSKPHVKRPMNAFMVWAQAARRKLADQYPHLHNAELSKTLGKLWRLLNESDKRPFIEEAERLRMQHKKDHPDYKYQPRRRKNGKAAQGEAECPGGEAEQGGTAAIQAHYKSAHLDHRHPGEGSPMSDGNPEHPSGQSHGPPTPPTTPKTELQSGKADPKRDGRSMGEGGKPHIDFGNVDIGEISHEVMSNMETFDVAELDQYLPPNGHPGHVSSYSAAGYGLGSALAVASGHSAWISKPPGVALPTVSPPGVDAKAQVKTETAGPQGPPHYTDQPSTSQIAYTSLSLPHYGSAFPSISRPQFDYSDHQPSGPYYGHSGQASGLYSAFSYMGPSQRPLYTAISDPSPSGPQSHSPTHWEQPVYTTLSRP

SEQ ID NO: 15652 - protein, 441 aa, Homo Sapiens
MVQQAESLEAESNLPREALDTEEGEFMACSPVALDESDPDWCKTASGHIKRPMNAFMVWSKIERRKIMEQSPDMHNAEISKRLGKRWKMLKDSEKIPFIREAERLRLKHMADYPDYKYRPRKKPKMDPSAKPSASQSPEKSAAGGGGGSAGGGAGGAKTSKGSSKKCGKLKAPAAAGAKAGAGKAAQSGDYGGAGDDYVLGSLRVSGSGGGGAGKTVKCVFLDEDDDDDDDDDELQLQIKQEPDEEDEEPPHQQLLQPPGQQPSQLLRRYNVAKVPASPTLSSSAESPEGASLYDEVRAGATSGAGGGSRLYYSFKNITKQHPPPLAQPALSPASSRSVSTSSSSSSGSSSGSSGEDADDLMFDLSLNFSQSAHSASEQQLGGGAAAGNLSLSLVDKDLDSFSEGSLGSHFEFPDYCTPELSEMIAGDWLEANFSDLVFTY

SEQ ID NO: 15653 - protein, 315 aa, Homo Sapiens
MVQQRGARAKRDGGPPPPGPGPAEEGAREPGWCKTPSGHIKRPMNAFMVWSQHERRKIMDQWPDMHNAEISKRLGRRWQLLQDSEKIPFVREAERLRLKHMADYPDYKYRPRKKSKGAPAKARPRPPGGSGGGSRLKPGPQLPGRGGRRAAGGPLGGGAAAPEDDDEDDDEELLEVRLVETPGRELWRMVPAGRAARGQAERAQGPSGEGAAAAAAASPTPSEDEEPEEEEEEAAAAEEGEEETVASGEESLGFLSRLPPGPAGLDCSALDRDPDLQPPSGTSHFEFPDYCTPEVTEMIAGDWRPSSIADLVFTY

SEQ ID NO: 15654 - protein, 622 aa, Homo Sapiens
MSMRSPISAQLALDGVGTMVNCTIKSEEKKEPCHEAPQGSATAAEPQPGDPARASQDSADPQAPAQGNFRGSWDCSSPEGNGSPEPKRPGVSEAASGSQEKLDFNRNLKEVVPAIEKLLSSDWKERFLGRNSMEAKDVKGTQESLAEKELQLLVMIHQLSTLRDQLLTAHSEQKNMAAMLFEKQQQQMELARQQQEQIAKQQQQLIQQQHKINLLQQQIQQVNMPYVMIPAFPPSHQPLPVTPDSQLALPIQPIPCKPVEYPLQLLHSPPAPVVKRPGAMATHHPLQEPSQPLNLTAKPKAPELPNTSSSPSLKMSSCVPRPPSHGGPTRDLQSSPPSLPLGFLGEGDAVTKAIQDARQLLHSHSGALDGSPNTPFRKDLISLDSSPAKERLEDGCVHPLEEAMLSCDMDGSRHFPESRNSSHIKRPMNAFMVWAKDERRKILQAFPDMHNSSISKILGSRWKSMTNQEKQPYYEEQARLSRQHLEKYPDYKYKPRPKRTCIVEGKRLRVGEYKALMRTRRQDARQSYVIPPQAGQVQMSSSDVLYPRAAGMPLAQPLVEHYVPRSLDPNMPVIVNTCSLREEGEGTDDRHSVADGEMYRYSEDEDSEGEEKSDGELVVLTD

SEQ ID NO: 15655 - protein, 240 aa, Homo Sapiens
MSKPSDHIKRPMNAFMVWSRGQRRKMAQENPKMHNSEISKRLGAEWKLLSEAEKRPYIDEAKRLRAQHMKEHPDYKYRPRRKPKNLLKKDRYVFPLPYLGDTDPLKAAGLPVGASDGLLSAPEKARAFLPPASAPYSLLDPAQFSSSAIQKMGEVPHTLATGALPYASTLGYQNGAFGSLSCPSQHTHTHPSPTNPGYVVPCNCTAWSASTLQPPVAYILFPGMTKTGIDPYSSAHATAM

SEQ ID NO: 15656 - protein, 233 aa, Homo Sapiens [sequence omitted]

SEQ ID NO: 15657 - protein, 414 aa, Homo Sapiens [sequence omitted]

SEQ ID NO: 15658 - protein, 384 aa, Homo Sapiens [sequence omitted]

SEQ ID NO: 15659 - protein, 317 aa, Homo Sapiens
MYNMMETELKPPGPQQTSGGGGGNSTAAAAGGNQKNSPDRVKRPMNAFMVWSRGQRRKMAQENPKMHNSEISKRLGAEWKLLSETEKRPFIDEAKRLRALHMKEHPDYKYRPRRKTKTLMKKDKYTLPGGLLAPGGNSMASGVGVGAGLGAGVNQRMDSYAHMNGWSNGSYSMMQDQLGYPQHPGLNAHGAAQMQPMHRYDVSALQYNSMTSSQTYMNGSPTYSMSYSQQGTPGMALGSMGSVVKSEASSSPPVVTSSSHSRAPCQAGDLRDMISMYLPGAEVPEPAAPSRLHMSQHYQSGPVPGTAINGTLPLSHM

SEQ ID NO: 15660 - protein, 276 aa, Homo Sapiens
MSKPVDHVKRPMNAFMVWSRAQRRKMAQENPKMHNSEISKRLGAEWKLLTESEKRPFIDEAKRLRAMHMKEHPDYKYRPRRKPKTLLKKDKFAFPVPYGLGGVADAEHPALKAGAGLHAGAGGGLVPESLLANPEKAAAAAAAAAARVFFPQSAAAAAAAAAAAAAGSPYSLLDLGSKMAEISSSSSGLPYASSLGYPTAGAGAFHGAAAAAAAAAAAAGGHTHSHPSPGNPGYMIPCNCSAWPSPGLQPPLAYILLPGMGKPQLDPYPAAYAAAL

SEQ ID NO: 15661 - protein, 446 aa, Homo Sapiens
MRPVRENSSGARSPRVPADLARSILISLPFPPDSLAHRPPSSAPTESQGLFTVAAPAPGAPSPPATLAHLLPAPAMYSLLETELKNPVGTPTQAAGTGGPAAPGGAGKSSANAAGGANSGGGSSGGASGGGGGTDQDRVKRPMNAFMVWSRGQRRKMALENPKMHNSEISKRLGADWKLLTDAEKRPFIDEAKRLRAVHMKEYPDYKYRPRRKTKTLLKKDKYSLPSGLLPPGAAAAAAAAAAAAAAASSPVGVGQRLDTYTHVNGWANGAYSLVQEQLGYAQPPSMSSPPPPPALPPMHRYDMAGLQYSPMMPPGAQSYMNVAAAAAAASGYGGMAPSATAAAAAAYGQQPATAAAAAAAAAAMSLGPMGSVVKSEPSSPPPAIASHSQRACLGDLRDMISMYLPPGGDAADAASPLPGGRLHGVHQHYQGAGTAVNGTVPLTHI

SEQ ID NO: 15662 - protein, 753 aa, Homo Sapiens [sequence omitted]

SEQ ID NO: 15663 - protein, 474 aa, Homo Sapiens
MVQQTNNAENTEALLAGESSDSGAGLELGIASSPTPGSTASTGGKADDPSWCKTPSGHIKRPMNAFMVWSQIERRKIMEQSPDMHNAEISKRLGKRWKLLKDSDKIPFIREAERLRLKHMADYPDYKYRPRKKVKSGNANSSSSAAASSKPGEKGDKVGGSGGGGHGGGGGGGSSNAGGGGGGASGGGANSKPAQKKSCGSKVAGGAGGGVSKPHAKLILAGGGGGGKAAAAAAASFAAEQAGAAALLPLGAAADHHSLYKARTPSASASASSAASASAALAAPGKHLAEKKVKRVYLFGGLGTSSSPVGGVGAGADPSDPLGLYEEEGAGCSPDAPSLSGRSSAASSPAAGRSPADHRGYASLRAASPAPSSAPSHASSSASSHSSSSSSSGSSSSDDEFEDDLLDLNPSSNFESMSLGSFSSSSALDRDLDFNFEPGSGSHFEFPDYCTPEVSEMISGDWLESSISNLVFTY

SEQ ID NO: 15664 - protein, 763 aa, Homo Sapiens [sequence omitted]

SEQ ID NO: 15665 - protein, 828 aa, Homo Sapiens
MSSKQATSPFACAADGEDAMTQDLTSREKEEGSDQHVASHLPLHPIMHNKPHSEELPTLVSTIQQDADWDSVLSSQQRMESENNKLCSLYSFRNTSTSPHKPDEGSRDREIMTSVTFGTPERRKGSLADVVDTLKQKKLEEMTRTEQEDSSCMEKLLSKDWKEKMERLNTSELLGEIKGTPESLAEKERQLSTMITQLISLREQLLAAHDEQKKLAASQIEKQRQQMDLARQQQEQIARQQQQLLQQQHKINLLQQQIQVQGHMPPLMIPIFPHDQRTLAAAAAAQQGFLFPPGITYKPGDNYPVQFIPSTMAAAAASGLSPLQLQKGHVSHPQINQRLKGLSDRFGRNLDTFEHGGGHSYNHKQIEQLYAAQLASMQVSPGAKMPSTPQPPNTAGTVSPTGIKNEKRGTSPVTQVKDEAAAQPLNLSSRPKTAEPVKSPTSPTQNLFPASKTSPVNLPNKSSIPSPIGGSLGRGSSLDILSSLNSPALFGDQDTVMKAIQEARKMREQIQREQQQQQPHGVDGKLSSINNMGLNSCRNEKERTRFENLGPQLTGKSNEDGKLGPGVIDLTRPEDAEGSKAMNGSAAKLQQYYCWPTGGATVAEARVYRDARGRASSEPHIKRPMNAFMVWAKDERRKILQAFPDMHNSNISKILGSRWKSMSNQEKQPYYEEQARLSKIHLEKYPNYKYKPRPKRTCIVDGKKLRIGEYKQLMRSRRQEMRQFFTVGQQPQIPITTGTGVVYPGAITMATTTPSPQMTSDCSSTSASPEPSLPVIQSTYGMKTDGGSLAGNEMINGEDEMEMYDDYEDDPKSDYSSENEAPEAVSAN

SEQ ID NO: 15666 - protein, 388 aa, Homo Sapiens [sequence omitted]

SEQ ID NO: 15667 - protein, 446 aa, Homo Sapiens [sequence omitted]

SEQ ID NO: 15668 - protein, 509 aa, Homo Sapiens
MNLLDPFMKMTDEQEKGLSGAPSPTMSEDSAGSPCPSGSGSDTENTRPQENTFPKGEPDLKKESEEDKFPVCIREAVSQVLKGYDWTLVPMPVRVNGSSKNKPHVKRPMNAFMVWAQAARRKLADQYPHLHNAELSKTLGKLWRLLNESEKRPFVEEAERLRVQHKKDHPDYKYQPRRRKSVKNGQAEAEEATEQTHISPNAIFKALQADSPHSSSGMSEVHSPGEHSGQSQGPPTPPTTPKTDVQPGKADLKREGRPLPEGGRQPPIDFRDVDIGELSSDVISNIETFDVNEFDQYLPPNGHPGVPATHGQVTYTGSYGISSTAATPASAGHVWMSKQQAPPPPPQQPPQAPPAPQAPPQPQAAPPQQPAAPPQQPQAHTLTTLSSEPGQSQRTHIKTEQLSPSHYSEQQQHSPQQIAYSPFNLPHYSPSYPPITRSQYDYTDHQNSSSYYSHAAGQGTGLYSTFTYMNPAQRPMYTPIADTSGVPSIPQTHSPQHWEQPVYTQLTRP

SEQ ID NO: 15669 - protein, 785 aa, Homo Sapiens
MSDQDHSMDEMTAVVKIEKGVGGNNGGNGNGGGAFSQARSSSTGSSSSTGGGGQESQPSPLALLAATCSRIESPNENSNNSQGPSQSGGTGELDLTATQLSQGANGWQIISSSSGATPTSKEQSGSSTNGSNGSESSKNRTVSGGQYVVAAAPNLQNQQVLTGLPGVMPNIQYQVIPQFQTVDGQQLQFAATGAQVQQDGSGQIQIIPGANQQIITNRGSGGNIIAAMPNLLQQAVPLQGLANNVLSGQTQYVTNVPVALNGNITLLPVNSVSAATLTPSSQAVTISSSGSQESGSQPVTSGTTISSASLVSSQASSSSFFTNANSYSTTTTTSNMGIMNFTTSGSSGTNSQGQTPQRVSGLQGSDALNIQQNQTSGGSLQAGQQKEGEQNQQTQQQQILIQPQLVQGGQALQALQAAPLSGQTFTTQAISQETLQNLQLQAVPNSGPIIIRTPTVGPNGQVSWQTLQLQNLQVQNPQAQTITLAPMQGVSLGQTSSSNTTLTPIASAASIPAGTVTVNAAQLSSMPGLQTINLSALGTSGIQVHPIQGLPLAIANAPGDHGAQLGLHGAGGDGIHDDTAGGEEGENSPDAQPQAGRRTRREACTCPYCKDSEGRGSGDPGKKKQHICHIQGCGKVYGKTSHLRAHLRWHTGERPFMCTWSYCGKRFTRSDELQRHKRTHTGEKKFACPECPKRFMRSDHLSKHIKTHQNKKGGPGVALSVGTLPLDSGAGSEGSGTATPSALITTNMVAMEAICPEGIARLANSGINVMQVADLQSINISGNGF

SEQ ID NO: 15670 - protein, 189 aa, Homo Sapiens; identical to SEQ ID NO: 3950

SEQ ID NO: 15671 - protein, 879 aa, Homo Sapiens
MAGGGGDLSTRRLNECISPVANEMNHLPAHSHDLQRMFTEDQGVDDRLLYDIVFKHFKRNKVEISNAIKKTFPFLEGLRDRDLITNKMFEDSQDSCRNLVPVQRVVYNVLSELEKTFNLPVLEALFSDVNMQEYPDLIHIYKGFENVIHDKLPLQESEEEEREERSGLQLSLEQGTGENSFRSLTWPPSGSPSHAGTTPPENGLSEHPCETEQINAKRKDTTSDKDDSLGSQQTNEQCAQKAEPTESCEQIAVQVNNGDAGREMPCPLPCDEESPEAELHNHGIQINSCSVRLVDIKKEKPFSNSKVECQAQARTHHNQASDIIVISSEDSEGSTDVDEPLEVFISAPRSEPVINNDNPLESNDEKEGQEATCSRPQIVPEPMDFRKLSTFRESFKKRVIGQDHDFSESSEEEAPAEASSGALRSKHGEKAPMTSRSTSTWRIPSRKRRFSSSDFSDLSNGEELQETCSSSLRRGSGSQPQEPENKKCSCVMCFPKGVPRSQEARTESSQASDMMDTMDVENNSTLEKHSGKRRKKRRHRSKVNGLQRGRKKDRPRKHLTLNNKVQKKRWQQRGRKANTRPLKRRRKRGPRIPKDENINFKQSELPVTCGEVKGTLYKERFKQGTSKKCIQSEDKKWFTPREFEIEGDRGASKNWKLSIRCGGYTLKVLMENKFLPEPPSTRKKRILESHNNTLVDPCEEHKKKNPDASVKFSEFLKKCSETWKTIFAKEKGKFEDMAKADKAHYEREMKTYIPPKGEKKKKFKDPNAPKRPPLAFFLFCSEYRPKIKGEHPGLSIDDVVKKLAGMWNNTAAADKQFYEKKAAKLKEKYKKDIAAYRAKGKPNSAKKRVVKAEKSKKKKEEEEDEEDEQEEENEEDDDK

SEQ ID NO: 15672 - protein, 689 aa, Homo Sapiens
MFTMTRAMEEALFQHFMHQKLGIAYAIHKPFPFFEGLLDNSIITKRMYMESLEACRNLIPVSRVVHNILTQLERTFNLSLLVTLFSQINLREYPNLVTIYRSFKRVGASYEWQSRDTPILLEAPTGLAEGSSLHTPLALPPPQPPQPSCSPCAPRVSEPGTSSQQSDEILSESPSPSDPVLPLPALIQEGRSTSVTNDKLTSKMNAEEDSEEMPSLLTSTVQVASDNLIPQIRDKEDPQEMPHSPLGSMPEIRDNSPEPNDPEEPQEVSSTPSDKKGKKRKRCIWSTPKRRHKKKSLPGGTASSRHGIQKKLKRVDQVPQKKDDSTCNSTVETRAQKARTECARKSRSEEIIDGTSEMNEGKRSQKTPSTPRRVTQGAASPGHGIQEKLQVVDKVTQRKDDSTWNSEVMMRVQKARTKCARKSRLKEKKKEKDICSSSKRRFQKNIHRRGKPKSDTVDFHCSKLPVTCGEAKGILYKKKMKHGSSVKCIRNEDGTWLTPNEFEVEGKGRNAKNWKRNIRCEGMTLGELLKRKNSDECEVCCQGGQLLCCGTCPRVFHEDCHIPPVEAKRMLWSCTFCRMKRSSGSQQCHHVSKTLERQMQPQDQLIRDYGEPFQEAMWLDLVKERLITEMYTVAWFVRDMRLMFRNHKTFYKASDFGQVGLDLEAEFEKDLKDVLGFHEANDGGFWTLP

SEQ ID NO: 15673 - protein, 867 aa, Homo Sapiens
MAQQGQQGQMASGDSNLNFRMVAEIQNVEGQNLQEQVCPEPIFRFFRENKVEIASAITRPFPFLMGLRDRSFISEQMYEHFQEAFRNLVPVTRVMYCVLSELEKTFGWSHLEALFSRINLMAYPDLNEIYRSFQNVCYEHSPLQMNNVNDLEDRPRLLPYGKQENSNACHEMDDIAVPQEALSSSPRCEPGFSSESCEQLALPKAGGGDAEDAPSLLPGGGVSCKLAIQIDEGESEEMPKLLPYDTEVLESNGMIDAARTYSTAPGEKQGEEEGRNSPRKRNQDKEKYQESPEGRDKETFDLKTPQVTNEGEPEKGLCLLPGEGEEGSDDCSEMCDGEEPQEASSSLARCGSVSCLSAETFDLKTPQVTNEGEPEKELSLLPGEGEEGSDDCSEMCDGEERQEASSSLARRGSVSSELENHPMNEEGESEELASSLLYDNVPGAEQSAYENEKCSCVMCFSEEVPGSPEARTESDQACGTMDTVDIANNSTLGKPKRKRRKKRGHGWSRMRMRRQENSQQNDNSKADGQVVSSEKKANVNLKDLSKIRGRKRGKPGTRFTQSDRAAQKRVRSRASRKHKDETVDFKAPLLPVTCGGVKGILHKKKLQQGILVKCIQTEDGKWFTPTEFEIKGGHARSKNWRLSVRCGGWPLRWLMENGFLPDPPRIRYRKKKRILKSQNNSSVDPCMRNLDECEVCRDGGELFCCDTCSRVFHEDCHIPPVEAERTPWNCIFCRMKESPGSQQCCQESEVLERQMCPEEQLKCEFLLLKVYCCSESSFFAKIPYYYYIREACQGLKEPMWLDKIKKRLNEHGYPQVEGFVQDMRLIFQNHRASYKYKDFGQMGFRLEAEFEKNFKEVFAIQETNGNN

SEQ ID NO: 15674 - protein, 580 aa, Homo Sapiens
MAGGGSDLSTRGLNGGVSQVANEMNHLPAHSQSLQRLFTEDQDVDEGLVYDTVFKHFKRHKLEISNAIKKTFPFLEGLRDRELITNKMFEDSEDSCRNLVPVQRVVYNVLSELEKTFNLSVLEALFSEVNMQEYPDLIHIYKSFKNAIQDKLSFQESDRKEREERPDIKLSLKQGEVPESPEARKESDQACGKMDTVDIANNSTLGKPKRKRRKKKGHGWSRMGTRTQKNNQQNDNSKADGQLVSSEKKANMNLKDLSKIRGRKRGKPGTHFTQSDRAPQKRVRSRASRKHKDETVDFQAPLLPVTCGGVKGILHKEKLEQGTLAKCIQTEDGKWFTPMEFEIKGGYARSKNWRLSVRCGGWPLRRLMEEGSLPNPPRIYYRNKKRILKSQNNSSVDPCMRNLDECEVCRDGGELFCCDTCSRVFHEDCHIPPVESEKTPWNCIFCRMKESPGSQQCCQESEVLERQMCPEEQLKCEFLLLKVYCCSESSFFAKIPYYYYIREACQGLKEPMWLDKIKKRLNEHGYPQVEGFVQDMRLIFQNHRASYKYKDFGQMGLRLEAEFEKDFKEVFAIQETNGNS

SEQ ID NO: 15675 - protein, 613 aa, Homo Sapiens
MSDPQTSMAATAAVSPSDYLQPAASTTQDSQPSPLALLAATCSKIGPPAVEAAVTPPAPPQPTPRKLVPIKPAPLPLSPGKNSFGILSSKGNILQIQGSQLSASYPGGQLVFAIQNPTMINKGTRSNANIQYQAVPQIQASNSQTIQVQPNLTNQIQIIPGTNQAIITPSPSSHKPVPIKPAPIQKSSTTTTPVQSGANVVKLTGGGGNVTLTLPVNNLVNASDTGAPTQLLTESPPTPLSKTNKKARKKSLPASQPPVAVAEQVETVLIETTADNIIQAGNNLLIVQSPGGGQPAVVQQVQVVPPKAEQQQVVQIPQQALRVVQAASATLPTVPQKPSQNFQIQAAEPTPTQVYIRTPSGEVQTVLVQDSPPATAAATSNTTCSSPASRAPHLSGTSKKHSAAILRKERPLPKIAPAGSIISLNAAQLAAAAQAMQTININGVQVQGVPVTITNTGGQQQLTVQNVSGNNLTISGLSPTQIQLQMEQALAGETQPGEKRRRMACTCPNCKDGEKRSGEQGKKKHVCHIPDCGKTFRKTSLLRAHVRLHTGERPFVCNWFFCGKRFTRSDELQRHARTHTGDKRFECAQCQKRFMRSDHLTKHYKTHLVTKNL

SEQ ID NO: 15676 - protein, 781 aa, Homo Sapiens
MTAPEKPVKQEEMAALDVDSGGGGGGGGGHGEYLQQQQQHGNGAVAAAAAAQDTQPSPLALLAATCSKIGPPSPGDDEEEAAAAAGAPAAAGATGDLASAQLGGAPNRWEVLSATPTTIKDEAGNLVQIPSAATSSGQYVLPLQNLQNQQIFSVAPGSDSSNGTVSSVQYQVIPQIQSADGQQVQIGFTGSSDNGGINQESSQIQIIPGSNQTLLASGTPSANIQNLIPQTGQVQVQGVAIGGSSFPGQTQVVANVPLGLPGNITFVPINSVDLDSLGLSGSSQTMTAGINADGHLINTGQAMDSSDNSERTGERVSPDINETNTDTDLFVPTSSSSQLPVTIDSTGILQQNTNSLTTSSGQVHSSDLQGNYIQSPVSEETQAQNIQVSTAQPVVQHLQLQESQQPTSQAQIVQGITPQTIHGVQASGQNISQQALQNLQLQLNPGTFLIQAQTVTPSGQVTWQTFQVQGVQNLQNLQIQNTAAQQITLTPVQTLTLGQVAAGGAFTSTPVSLSTGQLPNLQTVTVNSIDSAGIQLHPGENADSPADIRIKEEEPDPEEWQLSGDSTLNTNDLTHLRVQVVDEEGDQQHQEGKRLRRVACTCPNCKEGGGRGTNLGKKKQHICHIPGCGKVYGKTSHLRAHLRWHSGERPFVCNWMYCGKRFTRSDELQRHRRTHTGEKKFVCPECSKRFMRSDHLAKHIKTHQNKKGIHSSSTVLASVEAARDDTLITAGGTTLILANIQQGSVSGIGTVNTSATSNQDILTNTEIPLQLVTVSGNETME

SEQ ID NO: 15677 - protein, 784 aa, Homo Sapiens
MSDQKKEEEEEAAAAAAMATEGGKTSEPENNNKKPKTSGSQDSQPSPLALLAATCSKIGTPGENQATGQQQIIIDPSQGLVQLQNQPQQLELVTTQLAGNAWQLVASTPPASKENNVSQPASSSSSSSSSNNGSASPTKTKSGNSSTPGQFQVIQVQNPSGSVQYQVIPQLQTVEGQQIQINPTSSSSLQDLQGQIQLISAGNNQAILTAANRTASGNILAQNLANQTVPVQIRPGVSIPLQLQTLPGTQAQVVTTLPINIGGVTLALPVINNVAAGGGTGQVGQPAATADSGTSNGNQLVSTPTNTTTSASTMPESPSSSTTCTTTASTSLTSSDTLVSSADTGQYASTSASSSERTIEESQTPAATESEAQSSSQLQPNGMQNAQDQSNSLQQVQIVGQPILQQIQIQQPQQQIIQAIPPQSFQLQSGQTIQTIQQQPLQNVQLQAVNPTQVLIRAPTLTPSGQISWQTVQVQNIQSLSNLQVQNAGLSQQLTITPVSSSGGTTLAQIAPVAVAGAPITLNTAQLASVPNLQTVSVANLGAAGVQVQGVPVTITSVAGQQQGQDGVKVQQATIAPVTVAVGGIANATIGAVSPDQLTQVHLQQGQQTSDQEVQPGKRLRRVACSCPNCREGEGRGSNEPGKKKQHICHIEGCGKVYGKTSHLRAHLRWHTGERPFICNWMFCGKRFTRSDELQRHRRTHTGEKRFECPECSKRFMRSDHLSKHVKTHQNKKGGGTALAIVTSGELDSSVTEVLGSPRIVTVAAISQDSNPATPNVSTNMEEF

SEQ ID NO: 15678 - protein, 398 aa, Homo Sapiens
MAAVAVLRNDSLQAFLQDRTPSASPDLGKHSPLALLAATCSRIGQPGAAAPPDFLQVPYDPALGSPSRLFHPWTADMPAHSPGALPPPHPSLGLTPQKTHLQPSFGAAHELPLTPPADPSYPYEFSPVKMLPSSMAALPASCAPAYVPYAAQAALPPGYSNLLPPPPPPPPPPTCRQLSPNPAPDDLPWWSIPQAGAGPGASGVPGSGLSGACAGAPHAPRFPASAAAAAAAAAALQRGLVLGPSDFAQYQSQIAALLQTKAPLAATARRCRRCRCPNCQAAGGAPEAEPGKKKQHVCHVPGCGKVYGKTSHLKAHLRWHTGERPFVCNWLFCGKSFTRSDELQRHLRTHTGEKRFACPECGKRFMRSDHLAKHVKTHQNKKLKVAEAGVKREDARDL

SEQ ID NO: 15679 - protein, 376 aa, Homo Sapiens
MLTAVCGSLGSQHTEAPHASPPRLDLQPLQTYQGHTSPEAGDYPSPLQPGELQSLPLGPEVDFSQGYELPGASSRVTCEDLESDSPLAPGPFSKLLQPDMSHHYESWFRPTHPGAEDGSWWDLHPGTSWMDLPHTQGALTSPGHPGALQAGLGGYVGDHQLCAPPPHPHAHHLLPAAGGQHLLGPPDGAKALEVAAPESQGLDSSLDGAARPKGSRRSVPRSSGQTVCRCPNCLEAERLGAPCGPDGGKKKHLHNCHIPGCGKAYAKTSHLKAHLRWHSGDRPFVCNWLFCGKRFTRSDELQRHLQTHTGTKKFPCAVCSRVFMRSDHLAKHMKTHEGAKEEAAGAASGEGKAGGAVEPPGGKGKREAEGSVAPSN

SEQ ID NO: 15680 - protein, 431 aa, Homo Sapiens
MASSLLEEEVHYGSSPLAMLTAACSKFGGSSPLRDSTTLGKAGTKKPYSVGSDLSASKTMGDAYPAPFTSTNGLLSPAGSPPAPTSGYANDYPPFSHSFPGPTGTQDPGLLVPKGHSSSDCLPSVYTSLDMTHPYGSWYKAGIHAGISPGPGNTPTPWWDMHPGGNWLGGGQGQGDGLQGTLPTGPAQPPLNPQLPTYPSDFAPLNPAPYPAPHLLQPGPQHVLPQDVYKPKAVGNSGQLEGSGGAKPPRGASTGGSGGYGGSGAGRSSCDCPNCQELERLGAAAAGLRKKPIHSCHIPGCGKVYGKASHLKAHLRWHTGERPFVCNWLFCGKRFTRSDELERHVRTHTREKKFTCLLCSKRFTRSDHLSKHQRTHGEPGPGPPPSGPKELGEGRSTGEEEASQTPRPSASPATPEKAPGGSPEQSNLLEI

SEQ ID NO: 15681 - protein, 490 aa, Homo Sapiens
MLAATCNKIGSPSPSPSSLSDSSSSFGKGFHPWKRSSSSSSASCNVVGSSLSSFGVSGASRNGGSSSAAAAAAAAAAAAAALVSDSFSCGGSPGSSAFSLTSSSAAAAAAAAAAAASSSPFANDYSVFQAPGVSGGSGGGGGGGGGGSSAHSQDGSHQPVFISKVHTSVDGLQGIYPRVGMAHPYESWFKPSHPGLGAAGEVGSAGASSWWDVGAGWIDVQNPNSAAALPGSLHPAAGGLQTSLHSPLGGYNSDYSGLSHSAFSSGASSHLLSPAGQHLMDGFKPVLPGSYPDSAPSPLAGAGGSMLSAGPSAPLGGSPRSSARRYSGRATCDCPNCQEAERLGPAGASLRRKGLHSCHIPGCGKVYGKTSHLKAHLRWHTGERPFVCNWLFCGKRFTRSDELQRHLRTHTGEKRFACPVCNKRFMRSDHLSKHVKTHSGGGGGGGSAGSGSGGKKGSDTDSEHSAAGSPPCHSPELLQPPEPGHRNGLE

SEQ ID NO: 15682 - protein, 484 aa, Homo Sapiens
MATSILGEEPRFGTTPLAMLAATCNKIGNTSPLTTLPESSAFAKGGFHPWKRSSSSCNLGSSLSGFAVATGGRGSGGLAGGSGAANSAFCLASTSPTSSAFSSDYGGLFSNSAAAAAAAAGVSPQEAGGQSAFISKVHTTAADGLYPRVGMAHPYESWYKSGFHSTLAAGEVTNGAASSWWDVHSSPGSWLEVQNPAGGLQSSLHSGAPQASLHSQLGTYNPDFSSLTHSAFSSTGLGSSAAAASHLLSTSQHLLAQDGFKPVLPSYSDSSAAVAAAAASAMISGAAAAAAGGSSARSARRYSGRATCDCPNCQEAERLGPAGASLRRKGLHSCHIPGCGKVYGKTSHLKAHLRWHTGERPFVCNWLFCGKRFTRSDELQRHLRTHTGEKRFACPVCNKRFMRSDHLSKHIKTHNGGGGGKKGSDSDTDASNLETPRSESPDLILHDSGVSAARAAAAAAAAAAAAAAAASAGGKEAASGPNDS

SEQ ID NO: 15683 - protein, 335 aa, Homo Sapiens
MGSASPGLSSVSPSHLLLPPDTVSRTGLEKAAAGAVGLERRDWSPSPPATPEQGLSAFYLSYFDMLYPEDSSWAAKAPGASSREEPPEEPEQCPVIDSQAPAGSLDLVPGGLTLEEHSLEQVQSMVVGEVLKDIETACKLLNITADPMDWSPSNVQKWLLWTEHQYRLPPMGKAFQELAGKELCAMSEEQFRQRSPLGGDVLHAHLDIWKSAAWMKERTSPGAIHYCASTSEESWTDSEVDSSCSGQPIHLWQFLKELLLKPHSYGRFIRWLNKEKGIFKIEDSAQVARLWGIRKNRPAMNYDKLSRSIRQYYKKGIIRKPDISQRLVYQFVHPI

SEQ ID NO: 15684 - protein, 270 aa, Homo Sapiens
MLQACKMEGFPLVPPPSEDLVPYDTDLYQRQTHEYYPYLSSDGESHSDHYWDFHPHHVHSEFESFAENNFTELQSVQPPQLQQLYRHMELEQMHVLDTPMVPPHPSLGHQVSYLPRMCLQYPSLSPAQPSSDEEEGERQSPPLEVSDGEADGLEPGPGLLPGETGSKKKIRLYQFLLDLLRSGDMKDSIWWVDKDKGTFQFSSKHKEALAHRWGIQKGNRKKMTYQKMARALRNYGKTGEVKKVKKKLTYQFSGEVLGRGGLAERRHPPH

SEQ ID NO: 15685 - protein, 262 aa, Homo Sapiens
MLALEAAQLDGPHFSCLYPDGVFYDLDSCKHSSYPDSEGAPDSLWDWTVAPPVPATPYEAFDPAAAAFSHPQAAQLCYEPPTYSPAGNLELAPSLEAPGPGLPAYPTENFASQTLVPPAYAPYPSPVLSEEEDLPLDSPALEVSDSESDEALVAGPEGKGSEAGTRKKLRLYQFLLGLLTRGDMRECVWWVEPGAGVFQFSSKHKELLARRWGQQKGNRKRMTYQKLARALRNYAKTGEIRKVKRKLTYQFDSALLPAVRRA

SEQ ID NO: 15686 - protein, 248 aa, Homo Sapiens
MTCVEQDKLGQAFEDAFEVLRQHSTGDLQYSPDYRNYLALINHRPHVKGNSSCYGVLPTEEPVYNWRTVINSAADFYFEGNIHQSLQNITENQLVQPTLLQQKGGKGRKKLRLFEYLHESLYNPEMASCIQWVDKTKGIFQFVSKNKEKLAELWGKRKGNRKTMTYQKMARALRNYGRSGEITKIRRKLTYQFSEAILQRLSPSYFLGKEIFYSQCVQPDQEYLSLNNWNANYNYTYANYHELNHHDC

SEQ ID NO: 15687 - protein, 430 aa, Homo Sapiens
MASSAKSAEMPTISKTVNPTPDPHQEYLDPRITIALFEIGSHSPSSWGSLPFLKNSSHQVTEQQTAQKFNNLLKEIKDILKNMAGFEEKITEAKELFEETNITEDVSAHKENIRGLDKINEMLSTNLPVSLAPEKEDNEKKQEMILETNITEDVSAHKENIRGLDKINEMLSTNLPVSLAPEKEDNEKKQQMIMENQNSENTAQVFARDLVNRLEEKKVLNETQQSQEKAKNRLNVQEETMKIRNNMEQLLQEAEHWSKQHTELSKLIKSYQKSQKDISETLGNNGVGFQTQPNNEVSAKHELEEQVKKLSHDTYSLQLMAALLENECQILQQRVEILKELHHQKQGTLQEKPIQINYKQDKKNQKPSEAKKVEMYKQNKQAMKGTFWKKDRSCRSLDVCLNKKACNTQFNIHVARKALRGKMRSASSLR

SEQ ID NO: 15688 - protein, 1147 aa, Homo Sapiens
MDEPPFSEAALEQALGEPCDLDAALLTDIEDMLQLINNQDSDFPGLFDPPYAGSGAGGTDPASPDTSSPGSLSPPPATLSSSLEAFLSGPQAAPSPLSPPQPAPTPLKMYPSMPAFSPGPGIKEESVPLSILQTPTPQPLPGALLPQSFPAPAPPQFSSTPVLGYPSPPGGFSTGSPPGNTQQPLPGLPLASPPGVPPVSLHTQVQSVVPQQLLTVTAAPTAAPVTTTVTSQIQQVPVLLQPHFIKADSLLLTAMKTDGATVKAAGLSPLVSGTTVQTGPLPTLVSGGTILATVPLVVDAEKLPINRLAAGSKAPASAQSRGEKRTAHNAIEKRYRSSINDKIIELKDLVVGTEAKLNKSAVLRKAIDYIRFLQHSNQKLKQENLSLRTAVHKSKSLKDLVSACGSGGNTDVLMEGVKTEVEDTLTPPPSDAGSPFQSSPLSLGSRGSGSGGSGSDSEPDSPVFEDSKAKPEQRPSLHSRGMLDRSRLALCTLVFLCLSCNPLASLLGARGLPSPSDTTSVYHSPGRNVLGTESRDGPGWAQWLLPPVVWLLNGLLVLVSLVLLFVYGEPVTRPHSGPAVYFWRHRKQADLDLARGDFAQAAQQLWLALRALGRPLPTSHLDLACSLLWNLIRHLLQRLWVGRWLAGRAGGLQQDCALRVDASASARDAALVYHKLHQLHTMGKHTGGHLTATNLALSALNLAECAGDAVSVATLAEIYVAAALRVKTSLPRALHFLTRFFLSSARQACLAQSGSVPPAMQWLCHPVGHRFFVDGDWSVLSTPWESLYSLAGNPVDPLAQVTQLFREHLLERALNCVTQPNPSPGSADGDKEFSDALGYLQLLNSCSDAAGAPAYSFSISSSMATTTGVDPVAKWWASLTAVVIHWLRRDEEAAERLCPLVEHLPRVLQESERPLPRAALHSFKAARALLGCAKAESGPASLTICEKASGYLQDSLATTPASSSIDKAVQLFLCDLLLVVRTSLWRQQQPPAPAPAAQGTSSRPQASALELRGFQRDLSSLRRLAQSFRPAMRRVFLHEATARLMAGASPTRTHQLLDRSLRRRAGPGGKGGAVAELEPRPTRREHAEALLLASCYLPPGFLSAPGQRVGMLAEAARTLEKLGDRRLLHDCQQMLMRLGGGTTVTSS

SEQ ID NO: 15689 - protein, 1141 aa, Homo Sapiens
MDDSGELGGLETMETLTELGDELTLGDIDEMLQFVSNQVGEFPDLFSEQLCSSFPGSGGSGSSSGSSGSSSSSSNGRGSSSGAVDPSVQRSFTQVTLPSFSPSAASPQAPTLQVKVSPTSVPTTPRATPILQPRPQPQPQPQTQLQQQTVMITPTFSTTPQTRIIQQPLIYQNAATSFQVLQPQVQSLVTSSQVQPVTIQQQVQTVQAQRVLTQTANGTLQTLAPATVQTVAAPQVQQVPVLVQPQIIKTDSLVLTTLKTDGSPVMAAVQNPALTALTTPIQTAALQVPTLVGSSGTILTTMPVMMGQEKVPIKQVPGGVKQLEPPKEGERRTTHNIIEKRYRSSINDKIIELKDLVMGTDAKMHKSGVLRKAIDYIKYLQQVNHKLRQENMVLKLANQKNKLLKGIDLGSLVDNEVDLKIEDFNQNVLLMSPPASDSGSQAGFSPYSIDSEPGSPLLDDAKVKDEPDSPPVALGMVDRSRILLCVLTFLCLSFNPLTSLLQWGGAHDSDQHPHSGSGRSVLSFESGSGGWFDWMMPTLLLWLVNGVIVLSVFVKLLVHGEPVIRPHSRSSVTFWRHRKQADLDLARGDFAAAAGNLQTCLAVLGRALPTSRLDLACSLSWNVIRYSLQKLRLVRWLLKKVFQCRRATPATEAGFEDEAKTSARDAALAYHRLHQLHITGKLPAGSACSDVHMALCAVNLAECAEEKIPPSTLVEIHLTAAMGLKTRCGGKLGFLASYFLSRAQSLCGPEHSAVPDSLRWLCHPLGQKFFMERSWSVKSAAKESLYCAQRNPADPIAQVHQAFCKNLLERAIESLVKPQAKKKAGDQEEESCEFSSALEYLKLLHSFVDSVGVMSPPLSRSSVLKSALGPDIICRWWTSAITVAISWLQGDDAAVRSHFTKVERIPKALEVTESPLVKAIFHACRAMHASLPGKADGQQSSFCHCERASGHLWSSLNVSGATSDPALNHVVQLLTCDLLLSLRTALWQKQASASQAVGETYHASGAELAGFQRDLGSLRRLAHSFRPAYRKVFLHEATVRLMAGASPTRTHQLLEHSLRRRTTQSTKHGEVDAWPGQRERATAILLACRHLPLSFLSSPGQRAVLLAEAARTLEKVGDRRSCNDCQQMIVKLGGGTAIAAS

SEQ ID NO: 15690 - protein, 508 aa, Homo Sapiens
MLPTQAGAAAALGRGSALGGSLNRTPTGRPGGGGGTRGANGGRVPGNGAGLGPGRLEREAAAAAATTPAPTAGALYSGSEGDSESGEEEELGAERRGLKRSLSEMEIGMVVGGPEASAAATGGYGPVSGAVSGAKPGKKTRGRVKIKMEFIDNKLRRYTTFSKRKTGIMKKAYELSTLTGTQVLLLVASETGHVYTFATRKLQPMITSETGKALIQTCLNSPDSPPRSDPTTDQRMSATGFEETDLTYQVSESDSSGETKDTLKPAFTVTNLPGTTSTIQTAPSTSTTMQVSSGPSFPITNYLAPVSASVSPSAVSSANGTVLKSTGSGPVSSGGLMQLPTSFTLMPGGAVAQQVPVQAIQVHQAPQQASPSRDSSTDLTQTSSSGTVTLPATIMTSSVPTTVGGHMMYPSPHAVMYAPTSGLGDGSLTVLNAFSQAPSTMQVSHSQVQEPGGVPQVFLTASSGTVQIPVSAVQLHQMAVIGQQAGSSSNLTELQVVNLDTAHSTKSE

SEQ ID NO: 15691 - protein, 204 aa, Homo Sapiens
MQSYASAMLSVFNSDDYSPAVQENIPALRRSSSFLCTESCNSKYQCETGENSKGNVQDRVKRPMNAFIVWSRDQRRKMALENPRMRNSEISKQLGYQWKMLTEAEKWPFFQEAQKLQAMHREKYPNYKYRPRRKAKMLPKNCSLLPADPASVLCSEVQLDNRLYRDDCTKATHSRMEHQLGHLPPINAASSPQQRDRYSHWTKL

SEQ ID NO: 15692 - protein, 709 aa, Homo Sapiens
MAETLEFNDVYQEVKGSMNDGRLRLSRQGIIFKNSKTGKVDNIQAGELTEGIWRRVALGHGLKLLTKNGHVYKYDGFRESEFEKLSDFFKTHYRLELMEKDLCVKGWNWGTVKFGGQLLSFDIGDQPVFEIPLSNVSQCTTGKNEVTLEFHQNDDAEVSLMEVRFYVPPTQEDGVDPVEAFAQNVLSKADVIQATGDAICIFRELQCLTPRGRYDIRIYPTFLHLHGKTFDYKIPYTTVLRLFLLPHKDQRQMFFVISLDPPIKQGQTRYHFLILLFSKDEDISLTLNMNEEEVEKRFEGRLTKNMSGSLYEMVSRVMKALVNRKITVPGNFQGHSGAQCITCSYKASSGLLYPLERGFIYVHKPPVHIRFDEISFVNFARGTTTTRSFDFEIETKQGTQYTFSSIEREEYGKLFDFVNAKKLNIKNRGLKEGMNPSYDEYADSDEDQHDAYLERMKEEGKIREENANDSSDDSGEETDESFNPGEEEEDVAEEFDSNASASSSSNEGDSDRDEKKRKQLKKAKMAKDRKSRKKPVEVKKGKDPNAPKRPMSAYMLWLNASREKIKSDHPGISITDLSKKAGEIWKGMSKEKKEEWDRKAEDARRDYEKAMKEYEGGRGESSKRDKSKKKKKVKVKMEKKSTPSRGSSSKSSSRQLSESFKSKEFVSSDESSSGENKSKKKRRRSEDSEEEELASTPPSSEDSASGSDE

SEQ ID NO: 15693 - protein, 1047 aa, Homo Sapiens
MDAEAEDKTLRTRSKGTEVPMDSLIQELSVAYDCSMAKKRTAEDQALGVPVNKRKSLLMKPRHYSPKADCQEDRSDRTEDDGPLETHGHSTAEEIMIKPMDESLLSTAQENSSRKEDRYSCYQELMVKSLMHLGKFEKNVSVQTVSENLNDSGIQSLKAESDEADECFLIHSDDGRDKIDDSQPPFCSSDDNESNSESAENGWDSGSNFSEETKPPRVPKYVLTDHKKDLLEVPEIKTEGDKFIPCENRCDSETERKDPQNALAEPLDGNAQPSFPDVEEEDSESLAVMTEEGSDLEKAKGNLSLLEQAIALQAERGCVFHNTYKELDRFLLEHLAGERRQTKVIDMGGRQIFNNKHSPRPEKRETKCPIPGCDGTGHVTGLYPHHRSLSGCPHKVRVPLEILAMHENVLKCPTPGCTGRGHVNSNRNTHRSLSGCPIAAAEKLAMSQDKNQLDSPQTGQCPDQAHRTSLVKQIEFNFPSQAITSPRATVSKEQEKFGKVPFDYASFDAQVFGKRPLIQTVQGRKTPPFPESKHFPNPVKFPNRLPSAGAHTQSPGRASSYSYGQCSEDTHIAAAAAILNLSTRCREATDILSNKPQSLHAKGAEIEVDENGTLDLSMKKNRILDKSAPLTSSNTSIPTPSSSPFKTSSILVNAAFYQALCDQEGWDTPINYSKTHGKTEEEKEKDPVSSLENLEEKKFPGEASIPSPKPKLHARDLKKELITCPTPGCDGSGHVTGNYASHRSVSGCPLADKTLKSLMAANSQELKCPTPGCDGSGHVTGNYASHRSLSGCPRARKGGVKMTPTKEEKEDPELKCPVIGCDGQGHISGKYTSHRTASGCPLAAKRQKENPLNGASLSWKLNKQELPHCPLPGCNGLGHVNNVFVTHRSLSGCPLNAQVIKKGKVSEELMTIKLKATGGIESDEEIRHLDEEIKELNESNLKIEADMMKLQTQITSMESNLKTIEEENKLIEQNNESLLKELAGLSQALISSLADIQLPQMGPISEQNFEAYVNTLTDMYSNLERDYSPECKALLESIKQAVKGIHV

SEQ ID NO: 15694 - protein, 750 aa, Homo Sapiens
MSQWYELQQLDSKFLEQVHQLYDDSFPMEIRQYLAQWLEKQDWEHAANDVSFATIRFHDLLSQLDDQYSRFSLENNFLLQHNIRKSKRNLQDNFQEDPIQMSMIIYSCLKEERKILENAQRFNQAQSGNIQSTVMLDKQKELDSKVRNVKDKVMCIEHEIKSLEDLQDEYDFKCKTLQNREHETNGVAKSDQKQEQLLLKKMYLMLDNKRKEVVHKIIELLNVTELTQNALINDELVEWKRRQQSACIGGPPNACLDQLQNWFTIVAESLQQVRQQLKKLEELEQKYTYEHDPITKNKQVLWDRTFSLFQQLIQSSFVVERQPCMPTHPQRPLVLKTGVQFTVKLRLLVKLQELNYNLKVKVLFDKDVNERNTVKGFRKFNILGTHTKVMNMEESTNGSLAAEFRHLQLKEQKNAGTRTNEGPLIVTEELHSLSFETQLCQPGLVIDLETTSLPVVVISNVSQLPSGWASILWYNMLVAEPRNLSFFLTPPCARWAQLSEVLSWQFSSVTKRGLNVDQLNMLGEKLLGPNASPDGLIPWTRFCKENINDKNFPFWLWIESILELIKKHLLPLWNDGCIMGFISKERERALLKDQQPGTFLLRFSESSREGAITFTWVERSQNGGEPDFHAVEPYTKKELSAVTFPDIIRNYKVMAAENIPENPLKYLYPNIDKDHAFGKYYSRPKEAPEPMELDGPKGTGYIKTELISVSEVHPSRLQTTDNLLPMSPEEFDEVSRIVGSVEFDSMMNTV

SEQ ID NO: 15695 - protein, 851 aa, Homo Sapiens
MAQWEMLQNLDSPFQDQLHQLYSHSLLPVDIRQYLAVWIEDQNWQEAALGSDDSKATMLFFHFLDQLNYECGRCSQDPESLLLQHNLRKFCRDIQPFSQDPTQLAEMIFNLLLEEKRILIQAQRAQLEQGEPVLETPVESQQHEIESRILDLRAMMEKLVKSISQLKDQQDVFCFRYKIQAKGKTPSLDPHQTKEQKILQETLNELDKRRKEVLDASKALLGRLTTLIELLLPKLEEWKAQQQKACIRAPIDHGLEQLETWFTAGAKLLFHLRQLLKELKGLSCLVSYQDDPLTKGVDLRNAQVTELLQRLLHRAFVVETQPCMPQTPHRPLILKTGSKFTVRTRLLVRLQEGNESLTVEVSIDRNPPQLQGFRKFNILTSNQKTLTPEKGQSQGLIWDFGYLTLVEQRSGGSGKGSNKGPLGVTEELHIISFTVKYTYQGLKQELKTDTLPVVIISNMNQLSIAWASVLWFNLLSPNLQNQQFFSNPPKAPWSLLGPALSWQFSSYVGRGLNSDQLSMLRNKLFGQNCRTEDPLLSWADFTKRESPPGKLPFWTWLDKILELVHDHLKDLWNDGRIMGFVSRSQERRLLKKTMSGTFLLRFSESSEGGITCSWVEHQDDDKVLIYSVQPYTKEVLQSLPLTEIIRHYQLLTEENIPENPLRFLYPRIPRDEAFGCYYQEKVNLQERRKYLKHRLIVVSNRQVDELQQPLELKPEPELESLELELGLVPEPELSLDLEPLLKAGLDLGPELESVLESTLEPVIEPTLCMVSQTVPEPDQGPVSQPVPEPDLPCDLRHLNTEPMEIFRNCVKIEEIMPNGDPLLAGQNTVDEVYVSRPSHFYTDGPLMPSDF

SEQ ID NO: 15696 - protein, 770 aa, Homo Sapiens
MAQWNQLQQLDTRYLEQLHQLYSDSFPMELRQFLAPWIESQDWAYAASKESHATLVFHNLLGEIDQQYSRFLQESNVLYQHNLRRIKQFLQSRYLEKPMEIARIVARCLWEESRLLQTAATAAQQGGQANHPTAAVVTEKQQMLEQHLQDVRKRVQDLEQKMKVVENLQDDFDFNYKTLKSQGDMQDLNGNNQSVTRQKMQQLEQMLTALDQMRRSIVSELAGLLSAMEYVQKTLTDEELADWKRRQQIACIGGPPNICLDRLENWITSLAESQLQTRQQIKKLEELQQKVSYKGDPIVQHRPMLEERIVELFRNLMKSAFVVERQPCMPMHPDRPLVIKTGVQFTTKVRLLVKFPELNYQLKIKVCIDKDSGDVAALRGSRKFNILGTNTKVMNMEESNNGSLSAEFKHLTLREQRCGNGGRANCDASLIVTEELHLITFETEVYHQGLKIDLETHSLPVVVISNICQMPNAWASILWYNMLTNNPKNVNFFTKPPIGTWDQVAEVLSWQFSSTTKRGLSIEQLTTLAEKLLGPGVNYSGCQITWAKFCKENMAGKGFSFWVWLDNIIDLVKKYILALWNEGYIMGFISKERERAILSTKPPGTFLLRFSESSKEGGVTFTWVEKDISGKTQIQSVEPYTKQQLNNMSFAEIIMGYKIMDATNILVSPLVYLYPDIPKEEAFGKYCRPESQEHPEADPGSAAPYLKTKFICVTPTTCSNTIDLPMSPRTLDSLMQFGNNGEGAEPSAGGQFESLTFDMELTSECATSPM

SEQ ID NO: 15697 - protein, 748 aa, Homo Sapiens
MSQWNQVQQLEIKFLEQVDQFYDDNFPMEIRHLLAQWIENQDWEAASNNETMATILLQNLLIQLDEQLGRVSKEKNLLLIHNLKRIRKVLQGKFHGNPMHVAVVISNCLREERRILAAANMPVQGPLEKSLQSSSVSERQRNVEHKVAAIKNSVQMTEQDTKYLEDLQDEFDYRYKTIQTMDQSDKNSAMVNQEVLTLQEMLNSLDFKRKEALSKMTQIIHETDLLMNTMLIEELQDWKRRQQIACIGGPLHNGLDQLQNCFTLLAESLFQLRRQLEKLEEQSTKMTYEGDPIPMQRTHMLERVTFLIYNLFKNSFVVERQPCMPTHPQRPLVLKTLIQFTVKLRLLIKLPELNYQVKVKASIDKNVSTLSNRRFVLCGTNVKAMSIEESSNGSLSVEFRHLQPKEMKSSAGGKGNEGCHMVTEELHSITFETQICLYGLTIDLETSSLPVVMISNVSQLPNAWASIIWYNVSTNDSQNLVFFNNPPPATLSQLLEVMSWQFSSYVGRGLNSDQLHMLAEKLTVQSSYSDGHLTWAKFCKEHLPGKSFTFWTWLEAILDLIKKHILPLWIDGYVMGFVSKEKERLLLKDKMPGTFLLRFSESHLGGITFTWVDHSESGEVRFHSVEPYNKGRLSALPFADILRDYKVIMAENIPENPLKYLYPDIPKDKAFGKHYSSQPCEVSRPTERGDKGYVPSVFIPISTIRSDSTEPHSPSDLLPMSPSVYAVLRENLSPTTIETAMKSPYSAE

SEQ ID NO: 15698 - protein, 794 aa, Homo Sapiens
MAGWIQAQQLQGDALRQMQVLYGQHFPIEVRHYLAQWIESQPWDAIDLDNPQDRAQATQLLEGLVQELQKKAEHQVGEDGFLLKIKLGHYATQLQKTYDRCPLELVRCIRHILYNEQRLVREANNCSSPAGILVDAMSQKHLQINQTFEELRLVTQDTENELKKLQQTQEYFIIQYQESLRIQAQFAQLAQLSPQERLSRETALQQKQVSLEAWLQREAQTLQQYRVELAEKHQKTLQLLRKQQTIILDDELIQWKRRQQLAGNGGPPEGSLDVLQSWCEKLAEIIWQNRQQIRRAEHLCQQLPIPGPVEEMLAEVNATITDIISALVTSTFIIEKQPPQVLKTQTKFAATVRLLVGGKLNVHMNPPQVKATIISEQQAKSLLKNENTRNECSGEILNNCCVMEYHQATGTLSAHFRNMSLKRIKRADRRGAESVTEEKFTVLFESQFSVGSNELVFQVKTLSLPVVVIVHGSQDHNATATVLWDNAFAEPGRVPFAVPDKVLWPQLCEALNMKFKAEVQSNRGLTKENLVFLAQKLFNNSSSHLEDYSGLSVSWSQFNRENLPGWNYTFWQWFDGVMEVLKKHHKPHWNDGAILGFVNKQQAHDLLINKPDGTFLLRFSDSEIGGITIAWKFDSPERNLWNLKPFTTRDFSIRSLADRLGDLSYLIYVFPDRPKDEVFSKYYTPVLAKAVDGYVKPQIKQVVPEFVNASADAGGSSATYMDQAPSPAVCPQAPYNMYPQNPDHVLDQDGEFDLDETMDVARHVEELLRRPMDSLDSRLSPPAGLFTSARGSLS

SEQ ID NO: 15699 - protein, 794 aa, Homo Sapiens; identical to SEQ ID NO: 15698

SEQ ID NO: 15700 - protein, 787 aa, Homo Sapiens
MAVWIQAQQLQGEALHQMQALYGQHFPIEVRHYLSQWIESQAWDSVDLDNPQENIKATQLLEGLVQELQKKAEHQVGEDGFLLKIKLGHYATQLQNTYDRCPMELVRCIRHILYNEQRLVREANNGSSPAGSLADAMSQKHLQINQTFEELRLVTQDTENELKKLQQTQEYFIIQYQESLRIQAQFGPLAQLSPQERLSRETALQQKQVSLEAWLQREAQTLQQYRVELAEKHQKTLQLLRKQQTIILDDELIQWKRRQQLAGNGGPPEGSLDVLQSWCEKLAEIIWQNRQQIRRAEHLCQQLPIPGPVEEMLAEVNATITDIISALVTSTFIIEKQPPQVLKTQTKFAATVRLLVGGKLNVHMNPPQVKATIISEQQAKSLLKNENTRNDYSGEILNNCCVMEYHQATGTLSAHFRNMSLKRIKRSDRRGAESVTEEKFTILFESQFSVGGNELVFQVKTLSLPVVVIVHGSQDNNATATVLWDNAFAEPGRVPFAVPDKVLWPQLCEALNMKFKAEVQSNRGLTKENLVFLAQKLFNNSSSHLEDYSGLSVSWSQFNRENLPGRNYTFWQWFDGVMEVLKKHLKPHWNDGAILGFVNKQQAHDLLINKPDGTFLLRFSDSEIGGITIAWKFDSQERMFWNLMPFTTRDFSIRSLADRLGDLNYLIYVFPDRPKDEVYSKYYTPVPCESATAKAVDGYVKPQIKQVVPEFVNASADAGGGSATYMDQAPSPAVCPQAHYNMYPQNPDSVLDTDGDFDLEDTMDVARRVEELLGRPMDSQWIPHAQS

SEQ ID NO: 15701 - protein, 847 aa, Homo Sapiens
MSLWGLVSKMPPEKVQRLYVDFPQHLRHLLGDWLESQPWEFLVGSDAFCCNLASALLSDTVQHLQASVGEQGEGSTILQHISTLESIYQRDPLKLVATFRQILQGEKKAVMEQFRHLPMPFHWKQEELKFKTGLRRLQHRVGEIHLLREALQKGAEAGQVSLHSLIETPANGTGPSEALAMLLQETTGELEAAKALVLKRIQIWKRQQQLAGNGAPFEESLAPLQERCESLVDIYSQLQQEVGAAGGELEPKTRASLTGRLDEVLRTLVTSCFLVEKQPPQVLKTQTKFQAGVRFLLGLRFLGAPAKPPLVRADMVTEKQARELSVPQGPGAGAESTGEIINNTVPLENSIPGNCCSALFKNLLLKKIKRCERKGTESVTEEKCAVLFSASFTLGPGKLPIQLQALSLPLVVIVHGNQDNNAKATILWDNAFSEMDRVPFVVAERVPWEKMCETLNLKFMAEVGTNRGLLPEHFLFLAQKIFNDNSLSMEAFQHRSVSWSQFNKEILLGRGFTFWQWFDGVLDLTKRCLRSYWSDRLIIGFISKQYVTSLLLNEPDGTFLLRFSDSEIGGITIAHVIRGQDGSPQIENIQPFSAKDLSIRSLGDRIRDLAQLKNLYPKKPKDEAFRSHYKPEQMGKDGRGYVPATIKMTVERDQPLPTPELQMPTMVPSYDLGMAPDSSMSMQLGPDMVPQVYPPHSHSIPPYQGLSPEESVNVLSAFQEPHLQMPPSLGQMSLPFDQPHPQGLLPCQPQEHAVSSPDPLLCSDVTMVEDSCLSQPVTAFPQGTWIGEDIFPPLLPPTEQDLTKLLLEGQGESGGGSLGAQPLLQPSHYGQSGISMSHMDLRANPSW

SEQ ID NO: 15702 - protein, 443 aa, Homo Sapiens
MDRLGPFSNDPSDKPPCRGCSSYLMEPYIKCAECGPPPFFLCLQCFTRGFEYKKHQSDHTYEIMTSDFPVLDPSWTAQEEMALLEAVMDCGFGNWQDVANQMCTKTKEECEKHYMKHFINNPLFASTLLNLKQAEEAKTADTAIPFHSTDDPPRPTFDSLLSRDMAGYMPARADFIEEFDNYAEWDLRDIDFVEDDSDILHALKMAVVDIYHSRLKERQRRKKIIRDHGLINLRKFQLMERRYPKEVQDLYETMRRFARIVGPVEHDKFIESHALEFELRREIKRLQEYRTAGITNFCSARTYDHLKKTREEERLKRTMLSEVLQYIQDSSACQQWLRRQADIDSGLSPSIPMASNSGRRSAPPLNLTGLPGTEKLNEKEKELCQMVRLVPGAYLEYKSALLNECNKQGGLRLAQARALIKIDVNKTRKIYDFLIREGYITKG

SEQ ID NO: 15703 - protein, 420 aa, Homo Sapiens
MAELGKKYCVYCLAEVSPLRFRCTECQDIELCPECFSAGAEIGHHRRYHGYQLVDGGRFTLWGPEAEGGWTSREEQLLLDAIEQFGFGNWEDMAAHVGASRTPQEVMEHYVSMYIHGNLGKACIPDTIPNRVTDHTCPSGGPLSPSLTTPLPPLDISVAEQQQLGYMPLRDDYEIEYDQDAETLISGLSVNYDDDDVEIELKRAHVDMYVRKLKERQRRKNIARDYNLVPAFLGKDKKEKEKALKRKITKEEKELRLKLRPLYQFMSCKEFDDLFENMHKEKMLRAKIRELQRYRRNGITKMEESAEYEAARHKREKRKENKNLAGSKRGKEDGKDSEFAAIENLPGFELLSDREKVLCSSLNLSPARYVTVKTIIIKDHLQKRQGIPSKSRLPSYLDKVLKKRILNFLTESGWISRDAS

SEQ ID NO: 15704 - protein, 1872 aa, Homo Sapiens
MGPGCDLLLRTAATITAAAIMSDTDSDEDSAGGGPFSLAGFLFGNINGAGQLEGESVLDDECKKHLAGLGALGLGSLITELTANEELTGTDGALVNDEGWVRSTEDAVDYSDINEVAEDESRRYQQTMGSLQPLCHSDYDEDDYDADCEDIDCKLMPPPPPPPGPMKKDKDQDSITGEKVDFSSSSDSESEMGPQEATQAESEDGKLTLPLAGIMQHDATKLLPSVTELFPEFRPGKVLRFLRLFGPGKNVPSVWRSARRKRKKKHRELIQEEQIQEVECSVESEVSQKSLWNYDYAPPPPPEQCLSDDEITMMAPVESKFSQSTGDIDKVTDTKPRVAEWRYGPARLWYDMLGVPEDGSGFDYGFKLRKTEHEPVIKSRMIEEFRKLEENNGTDLLADENFLMVTQLHWEDDIIWDGEDVKHKGTKPQRASLAGWLPSSMTRNAMAYNVQQGFAATLDDDKPWYSIFPIDNEDLVYGRWEDNIIWDAQAMPRLLEPPVLTLDPNDENLILEIPDEKEEATSNSPSKESKKESSLKKSRILLGKTGVIKEEPQQNMSQPEVKDPWNLSNDEYYYPKQQGLRGTFGGNIIQHSIPAVELRQPFFPTHMGPIKLRQFHRPPLKKYSFGALSQPGPHSVQPLLKHIKKKAKMREQERQASGGGEMFFMRTPQDLTGKDGDLILAEYSEENGPLMMQVGMATKIKNYYKRKPGKDPGAPDCKYGETVYCHTSPFLGSLHPGQLLQAFENNLFRAPIYLHKMPETDFLIIRTRQGYYIRELVDIFVVGQQCPLFEVPGPNSKRANTHIRDFLQVFIYRLFWKSKDRPRRIRMEDIKKAFPSHSESSIRKRLKLCADFKRTGMDSNWWVLKSDFRLPTEEEIRAMVSPEQCCAYYSMIAAEQRLKDAGYGEKSFFAPEEENEEDFQMKIDDEVRTAPWNTTRAFIAAMKGKCLLEVTGVADPTGCGEGFSYVKIPNKPTQQKDDKEPQPVKKTVTGTDADLRRLSLKNAKQLLRKFGVPEEEIKKLSRWEVIDVVRTMSTEQARSGEGPMSKFARGSRFSVAEHQERYKEECQRIFDLQNKVLSSTEVLSTDTDSSSAEDSDFEEMGKNIENMLQNKKTSSQLSREREEQERKELQRMLLAAGSAASGNNHRDDDTASVTSLNSSATGRCLKIYRTFRDEEGKEYVRCETVRKPAVIDAYVRIRTTKDEEFIRKFALFDEQHREEMRKERRRIQEQLRRLKRNQEKEKLKGPPEKKPKKMKERPDLKLKCGACGAIGHMRTNKFCPLYYQTNAPPSNPVAMTEEQEEELEKTVIHNDNEELIKVEGTKIVLGKQLIESADEVRRKSLVLKFPKQQLPPKKKRRVGTTVHCDYLNRPHKSIHRRRTDPMVTLSSILESIINDMRDLPNTYPFHTPVNAKVVKDYYKIITRPMDLQTLRENVRKRLYPSREEFREHLELIVKNSATYNGPKHSLTQISQSMLDLCDEKLKEKEDKLARLEKAINPLLDDDDQVAFSFILDNIVTQKMMAVPDSWPFHHPVNKKFVPDYYKVIVNPMDLETIRKNISKHKYQSRESFLDDVNLILANSVKYNGPESQYTKTAQEIVNVCYQTLTEYDEHLTQLEKDICTAKEAALEEAELESLDPMTPGPYTPQPPDLYDTNTSLSMSRDASVFQDESNMSVLDIPSATPEKQVTQEGEDGDGDLADEEEGTVQQPQASVLYEDLLMSEGEDDEEDAGSDEEGDNPFSAIQLSESGSDSDVGSGGIRPKQPRMLQENTRMDMENEESMMSYEGDGGEASHGLEDSNISYGSYEEPDPKSNTQDTSFSSIGGYEVSEEEEDEEEEEQRSGPSVLSQVHLSEDEEDSEDFHSIAGDSDLDSDE

SEQ ID NO: 15705 - protein, 331 aa, Homo Sapiens
MTERPPSEAARSDPQLEGRDAAEASMAPPHLVLLNGVAKETSRAAAAEPPVIELGARGGPGGGPAGGGGAARDLKGRDAATAEARHRVPTTELCRPPGPAPAPAPASVTAELPGDGRMVQLSPPALAAPAAPGRALLYSLSQPLASLGSGFFGEPDAFPMFTTNNRVKRRPSPYEMEITDGPHTKVVRRIFTNSRERWRQQNVNGAFAELRKLIPTHPPDKKLSKNEILRLAMKYINFLAKLLNDQEEEGTQRAKTGKDPVVGAGGGGGGGGGGAPPDDLLQDVLSPNSSCGSSLDGAASPDSYTEEPAPKHTARSLHPAMLPAADGAGPR

SEQ ID NO: 15706 - protein, 108 aa, Homo Sapiens
MTRKIFTNTRERWRQQNVNSAFAKLRKLIPTHPPDKKLSKNETLRLAMRYINFLVKVLGEQSLQQTGVAAQGNILGLFPQGPHLPGLEDRTLLENYQVPSPGPSHHIP

SEQ ID NO: 15707 - protein, 789 aa, Homo Sapiens
MTSFQEVPLQTSNFAHVIFQNVAKSYLPNAHLECHYTLTPYIHPHPKDWVGIFKVGWSTARDYYTFLWSPMPEHYVEGSTVNCVLAFQGYYLPNDDGEFYQFCYVTHKGEIRGASTPFQFRASSPVEELLTMEDEGNSDMLVVTTKAGLLELKIEKTMKEKEELLKLIAVLEKETAQLREQVGRMERELNHEKERCDQLQAEQKGLTEVTQSLKMENEEFKKRFSDATSKAHQLEEDIVSVTHKAIEKETELDSLKDKLKKAQHEREQLECQLKTEKDEKELYKVHLKNTEIENTKLMSEVQTLKNLDGNKESVITHFKEEIGRLQLCLAEKENLQRTFLLTTSSKEDTCFLKEQLRKAEEQVQATRQEVVFLAKELSDAVNVRDRTMADLHTARLENEKVKKQLADAVAELKLNAMKKDQDKTDTLEHELRREVEDLKLRLQMAADHYKEKFKECQRLQKQINKLSDQSANNNNVFTKKTGNQQKVNDASVNTDPATSASTVDVKPSPSAAEADFDIVTKGQVCEMTKEIADKTEKYNKCKQLLQDEKAKCNKYADELAKMELKWKEQVKIAENVKLELAEVQDNYKELKRSLENPAERKMEGQNSQSPQCFKTCSEQNGYVLTLSNAQPVLQYGNPYASQETRDGADGAFYPDEIQRPPVRVPSWGLEDNVVCSQPARNFSRPDGLEDSEDSKEDENVPTAPDPPSQHLRGHGTGFCFDSSFDVHKKCPLCELMFPPNYDQSKFEEHVESHWKVCPMCSEQFPPDYDQQVFERHVQTHFDQNVLNFD

SEQ ID NO: 15708 - protein, 124 aa, Homo Sapiens
MSYIPGQPVTAVVQRVEIHKLRQGENLILGFSIGGGIDQDPSQNPFSEDKTDKGIYVTRVSEGGPAEIAGLQIGDKIMQVNGWDMTMVTHDQARKRLTKRSEEVVRLLVTRQSLQKAVQQSMLS

SEQ ID NO: 15709 - protein, 535 aa, Homo Sapiens
MGIVEPGCGDMLTGTEPMPGSDEGRAPGADPQHRYFYPEPGAQDADERRGGGSLGSPYPGGALVPAPPSRFLGAYAYPPRPQAAGFPGAGESFPPPADAEGYQPGEGYAAPDPRAGLYPGPREDYALPAGLEVSGKLRVALNNHLLWSKFNQHQTEMIITKQGRRMFPFLSFTVAGLEPTSHYRMFVDVVLVDQHHWRYQSGKWVQCGKAEGSMPGNRLYVHPDSPNTGAHWMRQEVSFGKLKLTNNKGASNNVTQMIVLQSLHKYQPRLHIVEVNDGEPEAACNASNTHIFTFQETQFIAVTAYQNAEITQLKIDNNPFAKGFRENFESMYTSVDTSIPSPPGPNCQFLGGDHYSPLLPNQYPVPSRFYPDLPGQAKDVVPQAYWLGAPRDHSYEAEFRAVSMKPAFLPSAPGPTMSYYRGQEVLAPGAGWPVAPQYPPKMGPASWFRPMRTLPMEPGPGGSEGRGPEDQGPPLVWTEIAPIRPESSDSGLGEGDSKRRRVSPYPSSGDSSSPAGAPSPFDKEAEGQFYNYFPN

SEQ ID NO: 15710 - protein, 339 aa, Homo Sapiens
MDQNNSLPPYAQGLASPQGAMTPGIPIFSPMMPYGTGLTPQPIQNTNSLSILEEQQRQQQQQQQQQQQQQQQQQQQQQQQQQQQQQQQQQQQQQQAVAAAAVQQSTSQQATQGTSGQAPQLFHSQTLTTAPLPGTTPLYPSPMTPMTPITPATPASESSGIVPQLQNIVSTVNLGCKLDLKTIALRARNAEYNPKRFAAVIMRIREPRTTALIFSSGKMVCTGAKSEEQSRLAARKYARVVQKLGFPAKFLDFKIQNMVGSCDVKFPIRLEGLVLTHQQFSSYEPELFPGLIYRMIKPRIVLLIFVSGKVVLTGAKVRAEIYEAFENIYPILKGFRKTT

SEQ ID NO: 15711 - protein, 186 aa, Homo Sapiens
MDADSDVALDILITNVVCVFRTRCHLNLRKIALEGANVIYKRDVGKVLMKLRKPRITATIWSSGKIICTGATSEEEAKFGARRLARSLQKLGFQVIFTDFKVVNVLAVCNMPFEIRLPEFTKNNRPHASYEPELHPAVCYRIKSLRATLQIFSTGSITVTGPNVKAVATAVEQIYPFVFESRKEIL

SEQ ID NO: 15712 - protein, 375 aa, Homo Sapiens
MASAPWPERVPRLLAPRLPSYPPPPPTVGLRSMEQEETYLELYLDQCAAQDGLAPPRSPLFSPVVPYDMYILNASNPDTAFNSNPEVKETSGDFSSVDLSFLPDEVTQENKDQPVISKHETEENSESQSPQSRLPSPSEQDVGLGLNSSSLSNSHSQLHPGDTDSVQPSPEKPNSDSLSLASITPMTPMTPISECCGIVPQLQNIVSTVNLACKLDLKKIALHAKNAEYNPKRFAAVIMRIREPRTTALIFSSGKMVCTGAKSEEQSRLAARKYARVVQKLGFPARFLDFKIQNMVGSCDVRFPIRLEGLVLTHQQFSSYEPELFPGLIYRMVKPRIVLLIFVSGKVVLTGAKERSEIYEAFENIYPILKGFKKA

SEQ ID NO: 15713 - protein, 682 aa, Homo Sapiens
MQLEHCLSPSIMLSKKFLNVSSSYPHSGGSELVLHDHPIISTTDNLERSSPLKKITRGMTNQSDTDNFPDSKDSPGDVQRSKLSPVLDGVSELRHSFDGSAADRYLLSQSSQPQSAATAPSAMFPYPGQHGPAHPAFSIGSPSRYMAHHPVITNGAYNSLLSNSSPQGYPTAGYPYPQQYGHSYQGAPFYQFSSTQPGLVPGKAQVYLCNRPLWLKFHRHQTEMIITKQGRRMFPFLSFNISGLDPTAHYNIFVDVILADPNHWRFQGGKWVPCGKADTNVQGNRVYMHPDSPNTGAHWMRQEISFGKLKLTNNKGASNNNGQMVVLQSLHKYQPRLHVVEVNEDGTEDTSQPGRVQTFTFPETQFIAVTAYQNTDITQLKIDHNPFAKGFRDNYDTIYTGCDMDRLTPSPNDSPRSQIVPGARYAMAGSFLQDQFVSNYAKARFHPGAGAGPGPGTDRSVPHTNGLLSPQQAEDPGAPSPQRWFVTPANNRLDFAASAYDTATDFAGNAATLLSYAAAGVKALPLQAAGCTGRPLGYYADPSGWGARSPPQYCGTKSGSVLPCWPNSAAAAARMAGANPYLGEEAEGLAAERSPLPPGAAEDAKPKDLSDSSWIETPSSIKSIDSSDSGIYEQAKRRRISPADTPVSESSSPLKSEVLAQRDCEKNCAKDISGYYGFYSHS

SEQ ID NO: 15714 - protein, 398 aa, Homo Sapiens
MHFSTVTRDMEAFTASSLSSLGAAGGFPGAASPGADPYGPREPPPPPPRYDPCAAAAPGAPGPPPPPHAYPFAPAAGAATSAAAEPEGPGASCAAAAKAPVKKNAKVAGVSVQLEMKALWDEFNQLGTEMIVTKAGRRMFPTFQVKLFGMDPMADYMLLMDFVPVDDKRYRYAFHSSSWLVAGKADPATPGRVHYHPDSPAKGAQWMKQIVSFDKLKLTNNLLDDNGHIILNSMHRYQPRFHVVYVDPRKDSEKYAEENFKTFVFEETRFTAVTAYQNHRITQLKIASNPFAKGFRDCDPEDWPRNHRPGALPLMSAFARSRNPVASPTQPSGTEKGGHVLKDKEVKAETSRNTPEREVELLRDAGGCVNLGLPCPAECQPFNTQGLVAGRTAGDRLC

SEQ ID NO: 15715 - protein, 385 aa, Homo Sapiens; identical to SEQ ID NO: 13037

SEQ ID NO: 15716 - protein, 602 aa, Homo Sapiens
MSERRRSAVALSSRAHAFSVEALIGSNKKRKLRDWEEKGLDLSMEALSPAGPLGDTEDAAAHGLEPHPDSEQSTGSDSEVLTERTSCSFSTHTDLASGAAGPVPAAMSSMEEIQVELQCADLWKRFHDIGTEMIITKAGRRMFPAMRVKITGLDPHQQYYIAMDIVPVDNKRYRYVYHSSKWMVAGNADSPVPPRVYIHPDSLASGDTWMRQVVSFDKLKLTNNELDDQGHIILHSMHKYQPRVHVIRKDFSSDLSPTKPVPVGDGVKTFNFPETVFTTVTAYQNQQITRLKIDRNPFAKGFRDSGRNRTGLEAIMETYAFWRPPVRTLTFEDFTTMQKQQGGSTGTSPTTSSTGTPSPSASSHLLSPSCSPPTFHLAPNTFNVGCRESQLCNLNLSDYPPCARSNMAALQSYPGLSDSGYNRLQSGTTSATQPSETFMPQRTPSLISGIPTPPSLPGNSKMEAYGGQLGSFPTSQFQYVMQAGNAASSSSSPHMFGGSHMQQSSYNAFSLHNPYNLYGYNFPTSPRLAASPEKLSASQSTLLCSSPSNGAFGERQYLPSGMEHSMHMISPSPNNQQATNTCDGRQYGAVPGSSSQMSVHMV

SEQ ID NO: 15717 - protein, 607 aa, Homo Sapiens
MAEKRRGSPCSMLSLKAHAFSVEALIGAEKQQQLQKKRRKLGAEEAAGAVDDGGCSRGGGAGEKGSSEGDEGAALPPPAGATSGPARSGADLERGAAGGCEDGFQQGASPLASPGGSPKGSPARSLARPGTPLPSPQAPRVDLQGAELWKRFHEIGTEMIITKAGRRMFPAMRVKISGLDPHQQYYIAMDIVPVDNKRYRYVYHSSKWMVAGNADSPVPPRVYIHPDSPASGETWMRQVISFDKLKLTNNELDDQGHIILHSMHKYQPRVHVIRKDCGDDLSPIKPVPSGEGVKAFSFPETVFTTVTAYQNQQITRLKIDRNPFAKGFRDSGRNRMGLEALVESYAFWRPSLRTLTFEDIPGIPKQGNASSSTLLQGTGNGVPATHPHLLSGSSCSSPAFHLGPNTSQLCSLAPADYSACARSGLTLNRYSTSLAETYNRLTNQAGETFAPPRTPSYVGVSSSTSVNMSMGGTDGDTFSCPQTSLSMQISGMSPQLQYIMPSPSSNAFATNQTHQGSYNTFRLHSPCALYGYNFSTSPKLAASPEKIVSSQGSFLGSSPSGTMTDRQMLPPVEGVHLLSSGGQQSFFDSRTLGSLTLSSSQVSAHMV

SEQ ID NO: 15718 - protein, 448 aa, Homo Sapiens
MAMSELGTRKPSDGTVSHLLNVVESELQAGREKGDPTEKQLQIILEDAPLWQRFKEVTNEMIVTKNGRRMFPVLKISVTGLDPNAMYSLLLDFVPTDSHRWKYVNGEWVPAGKPEVSSHSCVYIHPDSPNFGAHWMKAPISFSKVKLTNKLNGGGQIMLNSLHKYEPQVHIVRVGSAHRMVTNCSFPETQFIAVTAYQNEEITALKIKYNPFAKAFLDAKERNHLRDVPEAISESQHVTYSHLGGWIFSNPDGVCTAGNSNYQYAAPLPLPAPHTHHGCEHYSGLRGHRQAPYPSAYMHRNHSPSVNLIESSSNNLQVFSGPDSWTSLSSTPHASILSVPHTNGPINPGPSPYPCLWTISNGAGGPSGPGPEVHASTPGAFLLGNPAVTSPPSVLSTQAPTSAGVEVLGEPSLTSIAVSTWTAVASHPFAGWGGPGAGGHHSPSSLDG

SEQ ID NO: 15719 - protein, 712 aa, Homo Sapiens
MREPALAASAMAYHPFHAPRPADFPMSAFLAAAQPSFFPALALPPGALAKPLPDPGLAGAAAAAAAAAAAAEAGLHVSALGPHPPAAHLRSLKSLEPEDEVEDDPKVTLEAKELWDQFHKLGTEMVITKSGRRMFPPFKVRVSGLDKKAKYILLMDIVAADDCRYKFHNSRWMVAGKADPEMPKRMYIHPDSPATGEQWMAKPVAFHKLKLTNNISDKHGFTILNSMHKYQPRFHIVRANDILKLPYSTFRTYVFPETDFIAVTAYQNDKITQLKIDNNPFAKGFRDTGNGRREKRKQLTLPSLRLYEEHCKPERDGAESDASSCDPPPAREPPTSPGAAPSPLRLHRARAEEKSCAADSDPEPERLSEERAGAPLGRSPAPDSASPTRLTEPERARERRSPERGKEPAESGGDGPFGLRSLEKERAEARRKDEGRKEAAEGKEQGLAPLVVQTDSASPLGAGHLPGLAFSSHLHGQQFFGPLGAGQPLFLHPGQFTMGPGAFSAMGMGHLLASVAGGGNGGGGGPGTAAGLDAGGLGPAASAASTAAPFPFHLSQHMLASQGIPMPTFGGLFPYPYTYMAAAAAAASALPATSAAAAAAAAAGSLSRSPFLGSARPRLRFSPYQIPVTIPPSTSLLTTGLASEGSKAAGGNSREPSPLPELALRKVGAPSRGALSPSGSAKEAANELQSIQRLVSGLESQRALSPGRESPK

SEQ ID NO: 15720 - protein, 447 aa, Homo Sapiens
MEFTASPKPQLSSRANAFSIAALMSSGGSKEKEATENTIKPLEQFVEKSSCAQPLGELTSLDAHGEFGGGSGSSPSSSSLCTEPLIPTTPIIPSEEMAKIACSLETKELWDKFHELGTEMIITKSGRRMFPTIRVSFSGVDPEAKYIVLMDIVPVDNKRYRYAYHRSSWLVAGKADPPLPARLYVHPDSPFTGEQLLKQMVSFEKVKLTNNELDQHGHIILNSMHKYQPRVHIIKKKDHTASLLNLKSEEFRTFIFPETVFTAVTAYQNQLITKLKIDSNPFAKGFRDSSRLTDIERESVESLIQKHSYARSPIRTYGGEEDVLGDESQTTPNRGSAFTTSDNLSLSSWVSSSSSFPGFQHPQSLTALGTSTASIATPIPHPIQGSLPPYSRLGMPLTPSAIASSMQGSGPTFPSFHMPRYHHYFQQGPYAAIQGLRHSSAVMTPFV

SEQ ID NO: 15721 - protein, 535 aa, Homo Sapiens; identical to SEQ ID NO: 15709

SEQ ID NO: 15722 - protein, 520 aa, Homo Sapiens
MALSSRARAFSVEALVGRPSKRKLQDPIQAEQPELREKKGGEEEEERRSSAAGKSEPLEKQPKTEPSTSASSGCGSDSGYGNSSESLEEKDIQMELQGSELWKRFHDIGTEMIITKAGRRMFPSVRVKVKGLDPGKQYHVAIDVVPVDSKRYRYVYHSSQWMVAGNTDHLCIIPRFYVHPDSPCSGETWMRQIISFDRMKLTNNEMDDKGHIILQSMHKYKPRVHVIEQGSSVDLSQIQSLPTEGVKTFSFKETEFTTVTAYQNQQITKLKIERNPFAKGFRDTGRNRGVLDGLLETYPWRPSFTLDFKTFGADTQSGSSGSSPVTSSGGAPSPLNSLLSPLCFSPMFHLPTSSLGMPCPEAYLPNVNLPLCYKICPTNFWQQQPLVLPAPERLASSNSSQSLAPLMMEVPMLSSLGVTNSKSGSSEDSSDQYLQAPNSTNQMLYGLQSPGNIFLPNSITPEALSCSFHPSYDFYRYNFSMPSRLISGSNHLKVNDDSQVSFGEGKCNHVHWYPAINHYL

SEQ ID NO: 15723 - protein, 743 aa, Homo Sapiens
MSLSMRDPVIPGTSMAYHPFLPHRAPDFAMSAVLGHQPPFFPALTLPPNGAAALSLPGALAKPIMDQLVGAAETGIPFSSLGPQAHLRPLKTMEPEEEVEDDPKVHLEAKELWDQFHKRGTEMVITKSGRRMFPPFKVRCSGLDKKAKYILLMDIIAADDCRYKFHNSRWMVAGKADPEMPKRMYIHPDSPATGEQWMSKVVTFHKLKLTNNISDKHGFTLAFPSDHATWQGNYSFGTQTILNSMHKYQPRFHIVRANDILKLPYSTFRTYLFPETEFIAVTAYQNDKITQLKIDNNPFAKGFRDTGNGRREKRKQLTLQSMRVFDERHKKENGTSDESSSEQAAFNCFAQASSPAASTVGTSNLKDLCPSEGESDAEAESKEEHGPEACDAAKISTTTSEEPCRDKGSPAVKAHLFAAERPRDSGRLDKASPDSRHSPATISSSTRGLGAEERRSPVREGTAPAKVEEARALPGKEAFAPLTVQTDAAAAHLAQGPLPGLGFAPGLAGQQFFNGHPLFLHPSQFAMGGAFSSMAAAGMGPLLATVSGASTGVSGLDSTAMASAAAAQGLSGASAATLPFHLQQHVLASQGLAMSPFGSLFPYPYTYMAAAAAASSAAASSSVHRHPFLNLNTMRPRLRYSPYSIPVPVPDGSSLLTTALPSMAAAAGPLDGKVAALAASPASVAVDSGSELNSRSSTLSSSSMSLSPKLCAEKEAATSELQSIQRLVSGLEAKPDRSRSASP

SEQ ID NO: 15724 - protein, 545 aa, Homo Sapiens
MLQDKGLSESEEAFRAPGPALGEASAANAPEPALAAPGLSGAALGSPPGPGADVVAAAAAEQTIENIKVGLHEKELWKKFHEAGTEMIITKAGRRMFPSYKVKVTGMNPKTKYILLIDIVPADDHRYKFCDNKWMVAGKAEPAMPGRLYVHPDSPATGAHWMRQLVSFQKLKLTNNHLDPFGHIILNSMHKYQPRLHIVKADENNAFGSKNTAFCTHVFPETSFISVTSYQNHKITQLKIENNPFAKGFRGSDDSDLRVARLQSKEYPVISKSIMRQRLISPQLSATPDVGPLLGTHQALQHYQHENGAHSQLAEPQDLPLSTFPTQRDSSLFYHCLKRRDGTRHLDLPCKRSYLEAPSSVGEDHYFRSPPPYDQQMLSPSYCSEVTPREACMYSGSGPEIAGVSGVDDLPPPPLSCNMWTSVSPYTSYSVQTMETVPYQPFPTHFTATTMMPRLPTLSAQSSQPPGNAHFSVYNQLSQSQVRERGPSASFPRERGLPQGCERKPPSPHLNAANEFLYSQTFSLSRESSLQYHSGMGTVENWTDG

SEQ ID NO: 15725 - protein, 518 aa, Homo Sapiens
MADADEGFGLAHTPLEPDAKDLPCDSKPESALGAPSKSPSSPQAAFTQQGMEGIKVFLHERELWLKFHEVGTEMIITKAGRRMFPSYKVKVTGLNPKTKYILLMDIVPADDHRYKFADNKWSVTGKAEPAMPGRLYVHPDSPATGAHWMRQLVSFQKLKLTNNHLDPFGHIILNSMHKYQPRLHIVKADENNGFGSKNTAFCTHVFPETAFIAVTSYQNHKITQLKIENNPFAKGFRGSDDMELHRMSRMQSKEYPVVPRSTVRQKVASNHSPFSSESRALSTSSNLGSQYQCENGVSGPSQDLLPPPNPYPLPQEHSQIYHCTKRKEEECSTTDHPYKKPYMETSPSEEDSFYRSSYPQQQGLGASYRTESAQRQACMYASSAPPSEPVPSLEDISCNTWPSMPSYSSCTVTTVQPMDRLPYQHFSAHFTSGPLVPRLAGMANHGSPQLGEGMFQHQTSVAHQPVVRQCGPQTGLQSPGTLQPPEFLYSHGVPRTLSPHQYHSVHGVGMVPEWSDNS

SEQ ID NO: 15726 - protein, 436 aa, Homo Sapiens
MYHPRELYPSLGAGYRLGPAQPGADSSFPPALAEGYRYPELDTPKLDCFLSGMEAAPRTLAAHPPLPLLPPAMGTEPAPSAPEALHSLPGVSLSLENRELWKEFSSVGTEMIITKAGRRMFPACRVSVTGLDPEARYLFLLDVIPVDGARYRWQGRRWEPSGKAEPRLPDRVYIHPDSPATGAHWMRQPVSFHRVKLTNSTLDPHGHLILHSMHKYQPRIHLVRAAQLCSQHWGGMASFRFPETTFISVTAYQNPQITQLKIAANPFAKGFRENGRNCKRERDARVKRKLRGPEPAATEAYGSGDTPGGPCDSTLGGDIRESDPEQAPAPGEATAAPAPLCGGPSAEAYLLHPAAFHGAPSHLPTRSPSFPEAPDSGRSAPYSAAFLELPHGSGGSGYPAAPPAVPFAPHFLQGGPFPLPYTAPGGYLDVGSKPMY

SEQ ID NO: 15727 - protein, 682 aa, Homo Sapiens; identical to SEQ ID NO: 13041

SEQ ID NO: 15728 - protein, 199 aa, Homo Sapiens
MAFALLRPVGAHVLYPDVRLLSEDEENRSESDASDQSFGCCEGPEAARRGPGPGGGRRAGGGGGAGPVVVVRQRQAANARERDRTQSVNTAFTALRTLIPTEPVDRKLSKIETVRLASSYIAHLANVLLLGDSADDGQPCFRAAGSAKGAVPAAADGGRQPRSICTFCLSNQRKGGGRRDLGGSCLKVRGVAPLRGPRR

SEQ ID NO: 15729 - protein, 345 aa, Homo Sapiens
MLPCFQLLRIGGGRGGDLYTFHPPAGAGCTYRLGHRADLCDVALRPQQEPGLISGIHAELHAEPRGDDWRVSLEDHSSQGTLVNNVRLPRGHRLELSDGDLLTFGPEGPPGTSPSEFYFMFQQVRVKPQDFAAITIPRSRGEARVGAGFRPMLPSQGAPQRPLSTFSPAPKATLILNSIGSLSKLRPQPLTFSPSWGGPKSLPVPAPPGEMGTTPSAPPQRNRRKSVHRVLAELDDESEPPENPPPVLMEPRKKLRVDKAPLTPTGNRRGRPRKYPVSAPMAPPAVGGGEPCAAPCCCLPQEETVAWVQCDGCDVWFHVACVGCSIQAAREADFRCPGCRAGIQT

SEQ ID NO: 15730 - protein, 1960 aa, Homo Sapiens [sequence omitted]

SEQ ID NO: 15731 - protein, 179 aa, Homo Sapiens
MSTGSLSDVEDLQEVEMLECDGLKMDSNKEFVTSNESTEESSNCENGSPQKGRGGLGKRRKAPTKKSPLSGVSQEGKQVQRNAANARERARMRVLSKAFSRLKTTLPWVPPDTKLSKLDTLRLASSYIAHLRQILANDKYENGYIHPVNLTWPFMVAGKPESDLKEVVTASRLCGTTAS

SEQ ID NO: 15732 - protein, 214 aa, Homo Sapiens
MSQRKARGPPAMPGVGHSQTQAKARLLPGADRKRSRLSRTRQDPWEERSWSNQRWSRATPGPRGTRAGGLALGRSEASPENAARERSRVRTLRQAFLALQAALPAVPPDTKLSKLDVLVLAASYIAHLTRTLGHELPGPAWPPFLRGLRYLHPLKKWPMRSRLYAGGLGYSDLDSTTASTPSQRTRDAEVGSQVPGEADALLSTTPLSPALGDK

SEQ ID NO: 15733 - protein, 167 aa, Homo Sapiens
MDRGRPAGSPLSASAEPAPLAAAIRDSRPGRTGPGPAGPGGGSRSGSGRPAAANAARERSRVQTLRHAFLELQRTLPSVPPDTKLSKLDVLLLATTYIAHLTRSLQDDAEAPADAGLGALRGDGYLHPVKKWPMRSRLYIGATGQFLKHSVSGEKTNHDNTPTDSQP

SEQ ID NO: 15734 - protein, 676 aa, Homo Sapiens
MSRRALRRLRGEQRGQEPLGPGALHFDLRDDDDAEEEGPKRELGVRRPGGAGKEGVRVNNRFELINIDDLEDDPVVNGERSGCALTDAVAPGNKGRGQRGNTESKTDGDDTETVPSEQSHASGKLRKKKKKQKNKKSSTGEASENGLEDIDRILERIEDSTGLNRPGPAPLSSRKHVLYVEHRHLNPDTELKRYFGARAILGEQRPRQRQRVYPKCTWLTTPKSTWPRYSKPGLSMRLLESKKGLSFFAFEHSEEYQQAQHKFLVAVESMEPNNIVVLLQTSPYHVDSLLQLSDACRFQEDQEMARDLVERALYSMECAFHPLFSLTSGACRLDYRRPENRSFYLALYKQMSFLEKRGCPRTALEYCKLILSLEPDEDPLCMLLLIDHLALRARNYEYLIRLFQEWEAHRNLSQLPNFAFSVPLAYFLLSQQTDLPECEQSSARQKASLLIQQALTMFPGVLLPLLESCSVRPDASVSSHRFFGPNAEISQPPALSQLVNLYLGRSHFLWKEPATMSWLEENVHEVLQAVDAGDPAVEACENRRKVLYQRAPRNIHRHVILSEIKEAVAALPPDVTTQSVMGFDPLPPSDTIYSYVRPERLSPISHGNTIALFFRSLLPNYTMEGERPEEGVAGGLNRNQGLNRLMLAVRDMMANFHLNDLEAPHEDDAEGEGEWD

SEQ ID NO: 15735 - protein, 654 aa, Homo Sapiens
MNQPQRMAPVGTDKELSDLLDFSMMFPLPVTNGKGRPASLAGAQFGGSGLEDRPSSGSWGSGDQSSSSFDPSRTFSEGTHFTESHSSLSSSTFLGPGLGGKSGERGAYASFGRDAGVGGLTQAGFLSGELALNSPGPLSPSGMKGTSQYYPSYSGSSRRRAADGSLDTQPKKVRKVPPGLPSSVYPPSSGEDYGRDATAYPSAKTPSSTYPAPFYVADGSLHPSAELWSPPGQAGFGPMLGGGSSPLPLPPGSGPVGSSGSSSTFGGLHQHERMGYQLHGAEVNGGLPSASSFSSAPGATYGGVSSHTPPVSGADSLLGSRGTTAGSSGDALGKALASIYSPDHSSNNFSSSPSTPVGSPQGLAGTSQWPRAGAPGALSPSYDGGLHGLQSKIEDHLDEAIHVLRSHAVGTAGDMHTLLPGHGALASGFTGPMSLGGRHAGLVGGSHPEDGLAGSTSLMHNHAALPSQPGTLPDLSRPPDSYSGLGRAGATAAASEIKREEKEDEENTSAADHSEEEKKELKAPRARTSPDEDEDDLLPPEQKAEREKERRVANNARERLRVRDINEAFKELGRMCQLHLNSEKPQTKLLILHQAVSVILNLEQQVRERNLNPKAACLKRREEEKVSGVVGDPQMVLSAPHPGLSEAHNPAGHM

SEQ ID NO: 15736 - protein, 667 aa, Homo Sapiens
MHHQQRMAALGTDKELSDLLDFSAMFSPPVSSGKNGPTSLASGHFTGSNVEDRSSSGSWGNGGHPSPSRNYGDGTPYDHMTSRDLGSHDNLSPPFVNSRIQSKTERGSYSSYGRESNLQGCHQQSLLGGDMDMGNPGTLSPTKPGSQYYQYSSNNPRRRPLHSSAMEVQTKKVRKVPPGLPSSVYAPSASTADYNRDSPGYPSSKPATSTFPSSFFMQDGHHSSDPWSSSSGMNQPGYAGMLGNSSHIPQSSSYCSLHPHERLSYPSHSSADINSSLPPMSTFHRSGTNHYSTSSCTPPANGTDSIMANRGSGAAGSSQTGDALGKALASIYSPDHTNNSFSSNPSTPVGSPPSLSAGTAVWSRNGGQASSSPNYEGPLHSLQSRIEDRLERLDDAIHVLRNHAVGPSTAMPGGHGDMHGIIGPSHNGAMGGLGSGYGTGLLSANRHSLMVGTHREDGVALRGSHSLLPNQVPVPQLPVQSATSPDLNPPQDPYRGMPPGLQGQSVSSGSSEIKSDDEGDENLQDTKSSEDKKLDDDKKDIKSITSNNDDEDLTPEQKAEREKERRMANNARERLRVRDINEAFKELGRMVQLHLKSDKPQTKLLILHQAVAVILSLEQQVRERNLNPKAACLKRREEEKVSSEPPPLSLAGPHPGMGDASNHMGQM

SEQ ID NO: 15737 - protein, 384 aa, Homo Sapiens
MPQLDSGGGGAGGGDDLGAPDELLAFQDEGEEQDDKSRDSAAGPERDLAELKSSLVNESEGAAGGAGIPGVPGAGAGARGEAEALGREHAAQRLFPDKLPEPLEDGLKAPECTSGMYKETVYSAFNLLMHYPPPSGAGQHPQPQPPLHKANQPPHGVPQLSLYEHFNSPHPTPAPADISQKQVHRPLQTPDLSGFYSLTSGSMGQLPHTVSWFTHPSLMLGSGVPGHPAAIPHPAIVPPSGKQELQPFDRNLKTQAESKAEKEAKKPTIKKPLNAFMLYMKEMRAKVIAECTLKESAAINQILGRRWHALSREEQAKYYELARKERQLHMQLYPGWSARDNYGKKKRRSREKHQESTTETNWPRELKDGNGQESLSMSSSSSPA

SEQ ID NO: 15738 - protein, 588 aa, Homo Sapiens
MPQLGGGGGGGGGGSGGGGGSSAGAAGGGDDLGANDELIPFQDEGGEEQEPSSDSASAQRDLDEVKSSLVNESENQSSSSDSEAERRPQPVRDTFQKPRDYFAEVRRPQDSAFFKGPPYPGYPFLMIPDLSSPYLSNGPLSPGGARTYLQMKWPLLDVPSSATVKDTRSPSPAHLSNKVPVVQHPHHMHPLTPLITYSNDHFSPGSPPTHLSPEIDPKTGIPRPPHPSELSPYYPLSPGAVGQIPHPLGWLVPQQGQPMYSLPPGGFRHPYPALAMNASMSSLVSSRFSPHMVAPAHPGLPTSGIPHPAIVSPIVKQEPAPPSLSPAVSVKSPVTVKKEEEKKPHVKKPLNAFMLYMKEMRAKVVAECTLKESAAINQILGRKWHNLSREEQAKYYELARKERQLHSQLYPTWSARDNYGKKKKRKREKQLSQTQSQQQVQEAEGALASKSKKPCVQYLPPEKPCDSPASSHGSMLDSPATPSAALASPAAPAATHSEQAQPLSLTTKPETRAQLALHSAAFLSAKAAASSSGQMGSQPPLLSRPLPLGSMPTALLASPPSFPATLHAHQALPVLQAQPLSLVTKSAH

SEQ ID NO: 15739 - protein, 619 aa, Homo Sapiens
MPQLNGGGGDDLGANDELISFKDEGEQEEKSSENSSAERDLADVKSSLVNESETNQNSSSDSEAERRPPPRSESFRDKSRESLEEAAKRQDGGLFKGPPYPGYPFIMIPDLTSPYLPNGSLSPTARTLHFQSGSTHYSAYKTIEHQIAVQYLQMKWPLLDVQAGSLQSRQALKDARSPSPAHIVSNKVPVVQHPHHVHPLTPLITYSNEHFTPGNPPPHLPADVDPKTGIPRPPHPPDISPYYPLSPGTVGQIPHPLGWLVPQQGQPVYPITTGGFRHPYPTALTVNASMSRFPPHMVPPHHTLHTTGIPHPAIVTPTVKQESSQSDVGSLHSSKHQDSKKEEEKKKPHIKKPLNAFMLYMKEMRAKVVAECTLKESAAINQILGRRWHALSREEQAKYYELARKERQLHMQLYPGWSARDNYGKKKKRKRDKQPGETNEHSECFLNPCLSLPPITDLSAPKKCRARFGLDQQNNWCGPCRRKKKCVRYIQGEGSCLSPPSSDGSLLDSPPPSPNLLGSPPRDAKSQTEQTQPLSLSLKPDPLAHLSMMPPPPALLLAEATHKASALCPNGALDLPPAALQPAAPSSSIAQPSTSSLHSHSSLAGTQPQPLSLVTKSLE

SEQ ID NO: 15740 - protein, 500 aa, Homo Sapiens
MSGPGPREPPPEAGAAGGEAAVEGAGGGDAALGEPGLSFTTTDLSLVEMTEVEYTQLQHILCSHMEAAADGELETRLNSALLAAAGPGAGAGGFAAGGQGGAAPVYPVLCPSALAADAPCLGHIDFQELRMMLLSEAGAAEKTSGGGDGARARADGAAKEGAGAAAAAAGPDGAPEARAKPAVRVRLEDRFNSIPAEPPPAPRGPEPPEPGGALNNLVTLIRHPSELMNVPLQQQNKCTALVKNKTAATTTALQFTYPLFTTNACSTSGNSNLSQTQSSSNSCSVLEAAKHQDIGLPRAFSFCYQQEIESTKQTLGSRNKVLPEQVWIKVGEAALCKQALKRNRSRMRQLDTNVERRALGEIQNVGEGATATQGAWQSSESSQANLGEQAQSGPQGGRSQRRERHNRMERDRRRRIRICCDELNLLVPFCNAETDKATTLQWTTAFLKYIQERHGDSLKKEFESVFCGKTGRRLKLTRPDSLVTCPAQGSLQSSPSMEIK

SEQ ID NO: 15741 - protein, 426 aa, Homo Sapiens
MEPSSWSGSESPAENMERMSDSADKPIDNDAEGVWSPDIEQSFQEALAIYPPCGRRKIILSDEGKMYGRNELIARYIKLRTGKTRTRKQVSSHIQVLARRKSRDFHSKLKDQTAKDKALQHMAAMSSAQIVSATAIHNKLGLPGIPRPTFPGAPGFWPGMIQTGQPGSSQDVKPFVQQAYPIQPAVTAPIPGFEPASAPAPSVPAWQGRSIGTTKLRLVEFSAFLEQQRDPDSYNKHLFVHIGHANHSYSDPLLESVDIRQIYDKFPEKKGGLKELFGKGPQNAFFLVKFWADLNCNIQDDAGAFYGVTSQYESSENMTVTCSTKVCSFGKQVVEKVETEYARFENGRFVYRINRSPMCEYMINFIHKLKHLPEKYMMNSVLENFTILLVVTNRDTQETLLCMACVFEVSNSEHGAQHHIYRLVKD

SEQ ID NO: 15742 - protein, 447 aa, Homo Sapiens
MGEPRAGAALDDGSGWTGSEEGSEEGTGGSEGAGGDGGPDAEGVWSPDIEQSFQEALAIYPPCGRRKIILSDEGKMYGRNELIARYIKLRTGKTRTRKQVSSHIQVLARRKSREIQSKLKDQVSKDKAFQTMATMSSAQLISAPSLQAKLGPTGPQASELFQFWSGGSGPPWNVPDVKPFSQTPFTLSLTPPSTDLPGYEPPQALSPLPPPTPSPPAWQARGLGTARLQLVEFSAFVEPPDAVDSYQRHLFVHISQHCPSPGAPPLESVDVRQIYDKFPEKKGGLRELYDRGPPHAFFLVKFWADLNWGPSGEEAGAGGSISSGGFYGVSSQYESLEHMTLTCSSKVCSFGKQVVEKVETERAQLEDGRFVYRLLRSPMCEYLVNFLHKLRQLPERYMMNSVLENFTILQVVTNRDTQELLLCTAYVFEVSTSERGAQHHIYRLVRD

SEQ ID NO: 15743 - protein, 435 aa, Homo Sapiens
MASNSWNASSSPGEAREDGPEGLDKGLDNDAEGVWSPDIEQSFQEALAIYPPCGRRKIILSDEGKMYGRNELIARYIKLRTGKTRTRKQVSSHIQVLARKKVREYQVGIKAMNLDQVSKDKALQSMASMSSAQIVSASVLQNKFSPPSPLPQAVFSTSSRFWSSPPLLGQQPGPSQDIKPFAQPAYPIQPPLPPTLSSYEPLAPLPSAAASVPVWQDRTIASSRLRLLEYSAFMEVQRDPDTYSKHLFVHIGQTNPAFSDPPLEAVDVRQIYDKFPEKKGGLKELYEKGPPNAFFLVKFWADLNSTIQEGPGAFYGVSSQYSSADSMTISVSTKVCSFGKQVVEKVETEYARLENGRFVYRIHRSPMCEYMINFIHKLKHLPEKYMMNSVLENFTILQVVTSRDSQETLLVIAFVFEVSTSEHGAQHHVYKLVKD

SEQ ID NO: 15744 - protein, 434 aa, Homo Sapiens
MEGTAGTITSNEWSSPTSPEGSTASGGSQALDKPIDNDAEGVWSPDIEQSFQEALAIYPPCGRRKIILSDEGKMYGRNELIARYIKLRTGKTRTRKQVSSHIQVLARRKAREIQAKLKDQAAKDKALQSMAAMSSAQIISATAFHSSMALARGPGRPAVSGFWQGALPGQAGTSHDVKPFSQQTYAVQPPLPLPGFESPAGPAPSPSAPPAPPWQGRSVASSKLWMLEFSAFLEQQQDPDTYNKHLFVHIGQSSPSYSDPYLEAVDIRQIYDKFPEKKGGLKDLFERGPSNAFFLVKFWADLNTNIEDEGSSFYGVSSQYESPENMIITCSTKVCSFGKQVVEKVETEYARYENGHYSYRIHRSPLCEYMINFIHKLKHLPEKYMMNSVLENFTILQVVTNRDTQETLLCIAYVFEVSASEHGAQHHIYRLVKE

SEQ ID NO: 15745 - protein, 303 aa, Homo Sapiens
MSDAGGGKKPPVDPQAGPGPGPGRAAGERGLSGSFPLVLKKLMENPPREARLDKEKGKEKLEEDEAAAASTMAVSASLMPPIWDKTIPYDGESFHLEYMDLDEFLLENGIPASPTHLAHNLLLPVAELEGKESASSSTASPPSSSTAIFQPSETVSSTESSLEKERETPSPIDPNCVEVDVNFNPDPADLVLSSVPGGELFNPRKHKFAEEDLKPQPMIKKAKKVFVPDEQKDEKYWTRRKKNNVAAKRSRDARRLKENQITIRAAFLEKENTALRTEVAELRKEVGKCKTIVSKYETKYGPL

SEQ ID NO: 15746 - protein, 439 aa, Homo Sapiens
MAEDVSSAAPSPRGCADGRDADPTEEQMAETERNDEEQFECQELLECQVQVGAPEEEEEEEEDAGLVAEAEAVAAGWMLDFLCLSLCRAFRDGRSEDFRRTRNSAEAIIHGLSSLTACQLRTIYICQFLTRIAAGKTLDAQFENDERITPLESALMIWGSIEKEHDKLHEEIQNLIKIQAIAVCMENGNFKEAEEVFERIFGDPNSHMPFKSKLLMIISQKDTFHSFFQHFSYNHMMEKIKSYVNYVLSEKSSTFLMKAAAKVVESKRTRTITSQDKPSGNDVEMETEANLDTRKSVSDKQSAVTESSEGTVSLLRSHKNLFLSKLQHGTQQQDLNKKERRVGTPQSTKKKKESRRATESRIPVSKSQPVTPEKHRARKRQAWLWEEDKNLRSGVRKYGEGNWSKILLHYKFNNRTSVMLKDRWRTMKKLKLISSDSED

SEQ ID NO: 15747 - protein, 542 aa, Homo Sapiens
MAAGAGTAGPASGPGVVRDPAASQPRKRPGREGGEGARRSDTMAGGGGSSDGSGRAAGRRASRSSGRARRGRHEPGLGGPAERGAGEARLEEAVNRWVLKFYFHEALRAFRGSRYGDFRQIRDIMQALLVRPLGKEHTVSRLLRVMQCLSRIEEGENLDCSFDMEAELTPLESAINVLEMIKTEFTLTEAVVESSRKLVKEAAVIICIKNKEFEKASKILKKHMSKDPTTQKLRNDLLNIIREKNLAHPVIQNFSYETFQQKMLRFLESHLDDAEPYLLTMAKKALKSESAASSTGKEDKQPAPGPVEKPPREPARQLRNPPTTIGMMTLKAAFKTLSGAQDSEAAFAKLDQKDLVLPTQALPASPALKNKRPRKDENESSAPADGEGGSELQPKNKRMTISRLVLEEDSQSTEPSAGLNSSQEAASAPPSKPTVLNQPLPGEKNPKVPKGKWNSSNGVEEKETWVEEDELFQVQAAPDEDSTTNITKKQKWTVEESEWVKAGVQKYGEGNWAAISKNYPFVNRTAVMIKDRWRTMKRLGMN

SEQ ID NO: 15748 - protein, 2136 aa, Homo Sapiens
MSRSRHARPSRLVRKEDVNKKKKNSQLRKTTKGANKNVASVKTLSPGKLKQLIQERDVKKKTEPKPPVPVRSLLTRAGAARMNLDRTEVLFQNPESLTCNGFTMALRSTSLSRRLSQPPLVVAKSKKVPLSKGLEKQHDCDYKILPALGVKHSENDSVPMQDTQVLPDIETLIGVQNPSLLKGKSQETTQFWSQRVEDSKINIPTHSGPAAEILPGPLEGTRCGEGLFSEETLNDTSGSPKMFAQDTVCAPFPQRATPKVTSQGNPSIQLEELGSRVESLKLSDSYLDPIKSEHDCYPTSSLNKVIPDLNLRNCLALGGSTSPTSVIKFLLAGSKQATLGAKPDHQEAFEATANQQEVSDTTSFLGQAFGAIPHQWELPGADPVHGEALGETPDLPEIPGAIPVQGEVFGTILDQQETLGMSGSVVPDLPVFLPVPPNPIATFNAPSKWPEPQSTVSYGLAVQGAIQILPLGSGHTPQSSSNSEKNSLPPVMAISNVENEKQVHISFLPANTQGFPLAPERGLFHASLGIAQLSQAGPSKSDRGSSQVSVTSTVHVVNTTVVTMPVPMVSTSSSSYTTLLPTLEKKKRKRCGVCEPCQQKTNCGECTYCKNRKNSHQICKKRKCEELKKKPSVVVPLEVIKENKRPQREKKPKVLKADFDNKPVNGPKSESMDYSRCGHGEEQKLELNPHTVENVTKNEDSMTGIEVEKWTQNKKSQLTDHVKGDFSANVPEAEKSKNSEVDKKRTKSPKLFVQTVRNGIKHVHCLPAETNVSFKKFNIEEFGKTLENNSYKFLKDTANHKNAMSSVATDMSCDHLKGRSNVLVFQQPGFNCSSIPHSSHSIINHHASIHNEGDQPKTPENIPSKEPKDGSPVQPSLLSLMKDRRLTLEQVVAIEALTQLSEAPSENSSPSKSEKDEESEQRTASLLNSCKAILYTVRKDLQDPNLQGEPPKLNHCPSLEKQSSCNTVVFNGQTTTLSNSHINSATNQASTKSHEYSKVTNSLSLFIPKSNSSKIDTNKSIAQGIITLDNCSNDLHQLPPRNNEVEYCNQLLDSSKKLDSDDLSCQDATHTQIEEDVATQLTQLASIIKINYIKPEDKKVESTPTSLVTCNVQQKYNQEKGTIQQKPPSSVHNNHGSSLTKQKNPTQKKTKSTPSRDRRKKKPTVVSYQENDRQKWEKLSYMYGTICDIWIASKFQNFGQFCPHDFPTVFGKISSSTKIWKPLAQTRSIMQPKTVFPPLTQIKLQRYPESAEEKVKVEPLDSLSLFHLKTESNGKAFTDKAYNSQVQLTVNANQKAHPLTQPSSPPNQCANVMAGDDQIRFQQVVKEQLMHQRLPTLPGISHETPLPESALTLRNVNVVCSGGITVVSTKSEEEVCSSSFGTSEFSTVDSAQKNFNDYAMNFFTNPTKNLVSITKDSELPTCSCLDRVIQKDKGPYYTHLGAGPSVAAVREIMENRYGQKGNAIRIEIVVYTGKEGKSSHGCPIAKWVLRRSSDEEKVLCLVRQRTGHHCPTAVMVVLIMVWDGIPLPMADRLYTELTENLKSYNGHPTDRRCTLNENRTCTCQGIDPETCGASFSFGCSWSMYFNGCKFGRSPSPRRFRIDPSSPLHEKNLEDNLQSLATRLAPIYKQYAPVAYQNQVEYENVARECRLGSKEGRPFSGVTACLDFCAHPHRDIHNMNNGSTVVCTLTREDNRSLGVIPQDEQLHVLPLYKLSDTDEFGSKEGMEAKIKSGAIEVLAPRRKKRTCFTQPVPRSGKKRAAMMTEVLAHKIRAVEKKPIPRIKRKNNSTTTNNSKPSSLPTLGSNTETVQPEVKSETEPHFILKSSDNTKTYSLMPSAPHPVKEASPGFSWSPKTASATPAPLKNDATASCGFSERSSTPHCTMPSGRLSGANAAAADGPGISQLGEVAPLPTLSAPVMEPLINSEPSTGVTEPLTPHQPNHQPSFLTSPQDLASSPMEEDEQHSEADEPPSDEPLSDDPLSPAEEKLPHIDEYWSDSEHIFLDANIGGVAIAPAHGSVLIECARRELHATTPVEHPNRNHPTRLSLVFYQHKNLNKPQHGFELNKIKFEAKEAKNKKMKASEQKDQAANEGPEQSSEVNELNQIPSHKALTLTHDNVVTVSPYALTHVAGPYNHWV

SEQ ID NO: 15749 - protein, 2002 aa, Homo Sapiens
MEQDRTNHVEGNRLSPFLIPSPPICQTEPLATKLQNGSPLPERAHPEVNGDTKWHSFKSYYGIPCMKGSQNSRVSPDFTQESRGYSKCLQNGGIKRTVSEPSLSGLLQIKKLKQDQKANGERRNFGVSQERNPGESSQPNVSDLSDKKESVSSVAQENAVKDFTSFSTHNCSGPENPELQILNEQEGKSANYHDKNIVLLKNKAVLMPNGATVSASSVEHTHGELLEKTLSQYYPDCVSIAVQKTTSHINAINSQATNELSCEITHPSHTSGQINSAQTSNSELPPKPAAVVSEACDADDADNASKLAAMLNTCSFQKPEQLQQQKSVFEICPSPAENNIQGTTKLASGEEFCSGSSSNLQAPGGSSERYLKQNEMNGAYFKQSSVFTKDSFSATTTPPPPSQLLLSPPPPLPQVPQLPSEGKSTLNGGVLEEHHHYPNQSNTTLLREVKIEGKPEAPPSQSPNPSTHVCSPSPMLSERPQNNCVNRNDIQTAGTMTVPLCSEKTRPMSEHLKHNPPIFGSSGELQDNCQQLMRNKEQEILKGRDKEQTRDLVPPTQHYLKPGWIELKAPRFHQAESHLKRNEASLPSILQYQPNLSNQMTSKQYTGNSNMPGGLPRQAYTQKTTQLEHKSQMYQVEMNQGQSQGTVDQHLQFQKPSHQVHFSKTDHLPKAHVQSLCGTRFHFQQRADSQTEKLMSPVLKQHLNQQASETEPFSNSHLLQHKPHKQAAQTQPSQSSHLPQNQQQQQKLQIKNKEEILQTFPHPQSNNDQQREGSFFGQTKVEECFHGENQYSKSSEFETHNVQMGLEEVQNINRRNSPYSQTMKSSACKIQVSCSNNTHLVSENKEQTTHPELFAGNKTQNLHHMQYFPNNVIPKQDLLHRCFQEQEQKSQQASVLQGYKNRNQDMSGQQAAQLAQQRYLIHNHANVFPVPDQGGSHTQTPPQKDTQKHAALRWHLLQKQEQQQTQQPQTESCHSQMHRPIKVEPGCKPHACMHTAPPENKTWKKVTKQENPPASCDNVQQKSIIETMEQHLKQFHAKSLFDHKALTLKSQKQVKVEMSGPVTVLTRQTTAAELDSHTPALEQQTTSSEKTPTKRTAASVLNNFIESPSKLLDTPIKNLLDTPVKTQYDFPSCRCVEQIIEKDEGPFYTHLGAGPNVAAIREIMEERFGQKGKAIRIERVIYTGKEGKSSQGCPIAKWVVRRSSSEEKLLCLVRERAGHTCEAAVIVILILVWEGIPLSLADKLYSELTETLRKYGTLTNRRCALNEERTCACQGLDPETCGASFSFGCSWSMYYNGCKFARSKIPRKFKLLGDDPKEEEKLESHLQNLSTLMAPTYKKLAPDAYNNQIEYEHRAPECRLGLKEGRPFSGVTACLDFCAHAHRDLHNMQNGSTLVCTLTREDNREFGGKPEDEQLHVLPLYKVSDVDEFGSVEAQEEKKRSGAIQVLSSFRRKVRMLAEPVKTCRQRKLEAKKAAAEKLSSLENSSNKNEKEKSAPSRTKQTENASQAKQLAELLRLSGPVMQQSQQPQPLQKQPPQPQQQQRPQQQQPHHPQTESVNSYSASGSTNPYMRRPNPVSPYPNSSHTSDIYGSTSPMNFYSTSSQAAGSYLNSSNPMNPYPGLLNQNTQYPSYQCNGNLSVDNCSPYLGSYSPQSQPMDLYRYPSQDPLSKLSLPPIHTLYQPRFGNSQSFTSKYLGYGNQNMQGDGFSSCTIRPNVHHVGKLPPYPTHEMDGHFMGATSRLPPNLSNPNMDYKNGEHHSPSHIIHNYSAAPGMFNSSLHALHLQNKENDMLSHTANGLSKMLPALNHDRTACVQGGLHKLSDANGQEKQPLALVQGVASGAEDNDEVWSDSEQSFLDPDIGGVAVAPTHGSILIECAKRELHATTPLKNPNRNHPTRISLVFYQHKSMNEPKHGLALWEAKMAEKAREKEEECEKYGPDYVPQKSHGKKVKREPAEPHETSEPTYLRFIKSLAERTMSVTTDSTVTTSPYAFTRVTGPYNRYI

SEQ ID NO: 15750 - protein, 1660 aa, Homo Sapiens
MDSGPVYHGDSRQLSASGVPVNGAREPAGPSLLGTGGPWRVDQKPDWEAAPGPAHTARLEDAHDLVAFSAVAEAVSSYGALSTRLYETFNREMSREAGNNSRGPRPGPEGCSAGSEDLDTLQTALALARHGMKPPNCNCDGPECPDYLEWLEGKIKSVVMEGGEERPRLPGPLPPGEAGLPAPSTRPLLSSEVPQISPQEGLPLSQSALSIAKEKNISLQTAIAIEALTQLSSALPQPSHSTPQASCPLPEALSPPAPFRSPQSYLRAPSWPVVPPEEHSSFAPDSSAFPPATPRTEFPEAWGTDTPPATPRSSWPMPRPSPDPMAELEQLLGSASDYIQSVFKRPEALPTKPKVKVEAPSSSPAPAPSPVLQREAPTPSSEPDTHQKAQTALQQHLHHKRSLFLEQVHDTSFPAPSEPSAPGWWPPPSSPVPRLPDRPPKEKKKKLPTPAGGPVGTEKAAPGIKPSVRKPIQIKKSRPREAQPLFPPVRQIVLEGLRSPASQEVQAHPPAPLPASQGSAVPLPPEPSLALFAPSPSRDSLLPPTQEMRSPSPMTALQPGSTGPLPPADDKLEELIRQFEAEFGDSFGLPGPPSVPIQDPENQQTCLPAPESPFATRSPKQIKIESSGAVTVLSTTCFHSEEGGQEATPTKAENPLTPTLSGFLESPLKYLDTPTKSLLDTPAKRAQAEFPTCDCVEQIVEKDEGPYYTHLGSGPTVASIRELMEERYGEKGKAIRIEKVIYTGKEGKSSRGCPIAKWVIRRHTLEEKLLCLVRHRAGHHCQNAVIVILILAWEGIPRSLGDTLYQELTDTLRKYGNPTSRRCGLNDDRTCACQGKDPNTCGASFSFGCSWSMYFNGCKYARSKTPRKFRLAGDNPKEEEVLRKSFQDLATEVAPLYKRLAPQAYQNQVTNEEIAIDCRLGLKEGRPFAGVTACMDFCAHAHKDQHNLYNGCTVVCTLTKEDNRCVGKIPEDEQLHVLPLYKMANTDEFGSEENQNAKVGSGAIQVLTAFPREVRRLPEPAKSCRQRQLEARKAAAEKKKIQKEKLSTPEKIKQEALELAGITSDPGLSLKGGLSQQGLKPSLKVEPQNHFSSFKYSGNAVVESYSVLGNCRPSDPYSMNSVYSYHSYYAQPSLTSVNGFHSKYALPSFSYYGFPSSNPVFPSQFLGPGAWGHSGSSGSFEKKPDLHALHNSLSPAYGGAEFAELPSQAVPTDAHHPTPHHQQPAYPGPKEYLLPKAPLLHSVSRDPSPFAQSSNCYNRSIKQEPVDPLTQAEPVPRDAGKMGKTPLSEVSQNGGPSHLWGQYSGGPSMSPKRTNGVGGSWGVFSSGESPAIVPDKLSSFGASCLAPSHFTDGQWGLFPGEGQQAASHSGGRLRGKPWSPCKFGNSTSALAGPSLTEKPWALGAGDFNSALKGSPGFQDKLWNPMKGEEGRIPAAGASQLDRAWQSFGLPLGSSEKLFGALKSEEKLWDPFSLEEGPAEEPPSKGAVKEEKGGGGAEEEEEELWSDSEHNFLDENIGGVAVAPAHGSILIECARRELHATTPLKKPNRCHPTRISLVFYQHKNLNQPNHGLALWEAKMKQLAERARARQEEAARLGLGQQEAKLYGKKRKWGGTVVAEPQQKEKKGVVPTRQALAVPTDSAVTVSSYAYTKVTGPYSRWI

SEQ ID NO: 15751 - protein, 246 aa, Homo Sapiens; identical to SEQ ID NO: 13129

SEQ ID NO: 15752 - protein, 437 aa, Homo Sapiens
MLWKLTDNIKYEDCEDRHDGTSNGTARLPQLGTVGQSPYTSAPPLSHTPNADFQPPYFPPPYQPIYPQSQDPYSHVNDPYSLNPLHAQPQPQHPGWPGQRQSQESGLLHTHRGLPHQLSGLDPRRDYRRHEDLLHGPHALSSGLGDLSIHSLPHAIEEVPHVEDPGINIPDQTVIKKGPVSLSKSNSNAVSAIPINKDNLFGGVVNPNEVFCSVPGRLSLLSSTSKYKVTVAEVQRRLSPPECLNASLLGGVLRRAKSKNGGRSLREKLDKIGLNLPAGRRKAANVTLLTSLVEGEAVHLARDFGYVCETEFPAKAVAEFLNRQHSDPNEQVTRKNMLLATKQICKEFTDLLAQDRSPLGNSRPNPILEPGIQSCLTHFNLISHGFGSPAVCAAVTALQNYLTEALKAMDKMYLSNNPNSHTDNNAKSSDKEEKHRK

SEQ ID NO: 15753 - protein, 460 aa, Homo Sapiens
MHSPPRDQAAIMLWKLVENVKYEDIYEDRHDGVPSHSSRLSQLGSVSQGPYSSAPPLSHTPSSDFQPPYFPPPYQPLPYHQSQDPYSHVNDPYSLNPLHQPQQHPWGQRQRQEVGSEAGSLLPQPRAALPQLSGLDPRRDYHSVRRPDVLLHSAHHGLDAGMGDSLSLHGLGHPGMEDVQSVEDANNSGMNLLDQSVIKKVPVPPKSVTSLMMNKDGFLGGMSVNTGEVFCSVPGRLSLLSSTSKYKVTVGEVQRRLSPPECLNASLLGGVLRRAKSKNGGRSLRERLEKIGLNLPAGRRKAANVTLLTSLVEGEAVHLARDFGYICETEFPAKAVSEYLNRQHTDPSDLHSRKNMLLATKQLCKEFTDLLAQDRTPIGNSRPSPILEPGIQSCLTHFSLITHGFGAPAICAALTALQNYLTEALKGMDKMFLNNTTTNRHTSGEGPGSKTGDKEEKHRK

SEQ ID NO: 15754 - protein, 450 aa, Homo Sapiens
MLWKITDNVKYEEDCEDRHDGSSNGNPRVPHLSSAGQHLYSPAPPLSHTGVAEYQPPPYFPPPYQQLAYSQSADPYSHLGEAYAAAINPLHQPAPTGSQQQAWPGRQSQEGAGLPSHHGRPAGLLPHLSGLEAGAVSARRDAYRRSDLLLPHAHALDAAGLAENLGLHDMPHQMDEVQNVDDQHLLLHDQTVIRKGPISMTKNPLNLPCQKELVGAVMNPTEVFCSVPGRLSLLSSTSKYKVTVAEVQRRLSPPECLNASLLGGVLRRAKSKNGGRSLREKLDKIGLNLPAGRRKAAHVTLLTSLVEGEAVHLARDFAYVCEAEFPSKPVAEYLTRPHLGGRNEMAARKNMLLAAQQLCKEFTELLSQDRTPHGTSRLAPVLETNIQNCLSHFSLITHGFGSQAICAAVSALQNYIKEALIVIDKSYMNPGDQSPADSNKTLEKMEKHRK

SEQ ID NO: 15755 - protein, 452 aa, Homo Sapiens
MSTTFPGLVHDAEIRHDGSNSYRLMQLGCLESVANSTVAYSSSSPLTYSTTGTEFASPYFSTNHQYTPLHHQSFHYEFQHSHPAVTPDAYSLNSLHHSQQYYQQIHHGEPTDFINLHNARALKSSCLDEQRRELGCLDAYRRHDLSLMSHGSQYGMHPDQRLLPGPSLGLAAAGADDLQGSVEAQCGLVLNGQGGVIRRGGTCVVNPTDLFCSVPGRLSLLSSTSKYKVTIAEVKRRLSPPECLNASLLGGILRRAKSKNGGRCLREKLDRLGLNLPAGRRKAANVTLLTSLVEGEALHLARDFGYTCETEFPAKAVGEHLARQHMEQKEQTARKKMILATKQICKEFQDLLSQDRSPLGSSRPTPILDLDIQRHLTHFSLITHGFGTPAICAALSTFQTVLSEMLNYLEKHTTHKNGGAADSGQGHANSEKAPLRKTSEAAVKEGKTEKTD

SEQ ID NO: 15756 - protein, 442 aa, Homo Sapiens
MLVHTYSAMERPDGLGAAAGGARLSSLPQAAYGPAPPLCHTPAATAAAEFQPPYFPPPYPQPPLPYGQAPDAAAAFPHLAGDPYGGLAPLAQPQPPQAAWAAPRAAARAHEEPPGLLAPPARALGLDPRRDYATAVPRLLHGLADGAHGLADAPLGLPGLAAAPGLEDLQAMDEPGMSLLDQSVIKKVPIPSKASSLSALSLAKDSLVGGITNPGEVFCSVPGRLSLLSSTSKYKVTVGEVQRRLSPPECLNASLLGGVLRRAKSKNGGRCLRERLEKIGLNLPAGRRKAANVTLLTSLVEGEAVHLARDFGYVCETEFPAKAAAEYLCRQHADPGELHSRKSMLLAAKQICKEFADLMAQDRSPLGNSRPALILEPGVQSCLTHFSLITHGFGGPAICAALTAFQNYLLESLKGLDKMFLSSVGSGHGETKASEKDAKHRK

SEQ ID NO: 15757 - protein, 338 aa, Homo Sapiens
MEYFMVPTQKVPSLQHFRKTEKEVIGGLCSLANIPLTPETQRDQERRIRREIANSNERRRMQSINAGFQSLKTLIPHTDGEKLSKAAILQQTAEYIFSLEQEKTRLLQQNTQLKRFIQELSGSSPKRRRAEDKDEGIGSPDIWEDEKAEDLRREMIELRQQLDKERSVRMMLEEQVRSLEAHMYPEKLKVIAQQVQLQQQQEQVRLLHQEKLEREQQQLRTQLLPPPAPTHHPTVIVPAPPPPPSHHINVVTMGPSSVINSVSTSRQNLDTIVQAIQHIEGTQEKQELEEEQRRAVIVKPVRSCPEAPTSDTASDSEASDSDAMDQSREEPSGDGELP

SEQ ID NO: 15758 - protein, 346 aa, Homo Sapiens
MAASGKLSTCRLPPLPTIREIIKLLRLQAAKQLSQNFLLDLRLTDKIVRKAGNLTNAYVYEVGPGPGGITRSILNADVAELLVVEKDTRFIPGLQMLSDAAPGKLRIVHGDVLTFKVEKAFSESLKRPWEDDPPNVHIIGNLPFSVSTPLIIKWLENISCRDGPFVYGRTQMTLTFQKEVAERLAANTGSKQRSRLSVMAQYLCNVRHIFTIPGQAFVPKPEVDVGVVHFTPLIQPKIEQPFKLVEKVVQNVFQFRRKYCHRGLRMLFPEAQRLESTGRLLELADIDPTLRPRQLSISHFKSLCDVYRKMCDEDPQLFAYNFREELKRRKSKNEEKEEDDAENYRL

SEQ ID NO: 15759 - protein, 396 aa, Homo Sapiens
MWIPVVGLPRRLRLSALAGAGRFCILGSEAATRKHLPARNHCGLSDSSPQLWPEPDFRNPPRKASKASLDFKRYVTDRRLAETLAQIYLGKPSRPPHLLLECNPGPGILTQALLEAGAKVVALESDKTFIPHLESLGKNLDGKLRVIHCDFFKLDPRSGGVIKPPAMSSRGLFKNLGIEAVPWTADIPLKVVGMFPSRGEKRALWKLAYDLYSCTSIYKFGRIEVNMFIGEKEFQKLMADPGNPDLYHVLSVIWQLACEIKVLHMEPWSSFDIYTRKGPLENPKRRELLDQLQQKLYLIQMIPRQNLFTKNLTPMNYNIFFHLLKHCFGRRSATVIDHLRSLTPLDARDILMQIGKQEDEKVVNMHPQDFKTLFETIERSKDCAYKWLYDETLEDR

SEQ ID NO: 15760 - protein, 502 aa, Homo Sapiens
MAWALKLPLADEVIESGLVQDFDASLSGIGQELGAGAYSMSDVLALPIFKQEESSLPPDNENKILPFQYVLCAATSPAVKLHDETLTYLNQGQSYEIRMLDNRKLGELPEINGKLVKSIFRVVFHDRRLQYTEHQQLEGWRWNRPGDRILDIDIPMSVGIIDPRANPTQLNTVEFLWDPAKRTSVFIQVHCISTEFTMRKHGGEKGVPFRVQIDTFKENENGEYTEHLHSASCQIKVFKPKGADRKQKTDREKMEKRTPHEKEKYQPSYETTILTECSPWPEITYVNNSPSPGFNSSHSSFSLGEGNGSPNHQPEPPPPVTDNLLPTTTPQEAQQWLHRNRFSTFTRLFTNFSGADLLKLTRDDVIQICGPADGIRLFNALKGRMVRPRLTIYVCQESLQLREQQQQQQQQQQKHEDGDSNGTFFVYHAIYLEELTAVELTEKIAQLFSISPCQISQIYKQGPTGIHVLISDEMIQNFQEEACFILDTMKAETNDSYHIILK

SEQ ID NO: 15761 - protein, 479 aa, Homo Sapiens
MLFWHTQPEHYNQHNSGSYLRDVLALPIFKQEEPQLSPENEARLPPLQYVLCAATSPAVKLHEETLTYLNQGQSYEIRLLENRKLGDFQDLNTKYVKSIIRVVFHDRRLQYTEHQQLEGWRWSRPGDRILDIDIPLSVGILDPRASPTQLNAVEFLWDPAKRASAFIQVHCISTEFTPRKHGGEKGVPFRVQIDTFKQNENGEYTEHLHSASCQIKVFKPKGADRKQKTDREKMEKRTAQEKEKYQPSYETTILTECSPWPDVAYQVNSAPSPSYNGSPNSFGLGEGNASPTHPVEALPVGSDHLLPSASIQDAQQWLHRNRFSQFCRLFASFSGADLLKMSRDDLVQICGPADGIRLFNAIKGRNVRPKMTIYVCQELEQNRVPLQQKRDGSGDSNLSVYHAIFLEELTTLELIEKIANLYSISPQHIHRVYRQGPTGIHVVVSNEMVQNFQDESCFVLSTIKAESNDGYHIILKCGL

SEQ ID NO: 15762 - protein, 410 aa, Homo Sapiens
MAKDAGLIEANGELKVFIDQNLSPGKGVVSLVAVHPSTVNPLGKQLLPKTFGQSNVNIAQQVVIGTPQRPAASNTLVVGSPHTPSTHFASQNQPSDSSPWSAGKRNRKGEKNGKGLRHFSMKVCEKVQRKGTTSYNEVADELVAEFSAADNHILPNESAYDQKNIRRRVYDALNVLMAMNIISKEKKEIKWIGLPTNSAQECQNLEVERQRRLERIKQKQSQLQELILQQIAFKNLVQRNRHAEQQASRPPPPNSVIHLPFIIVNTSKKTVIDCSISNDKFEYLFNFDNTFEIHDDIEVLKRMGMACGLESGSCSAEDLKMARSLVPKALEPYVTEMAQGTVGGVFITTAGSTSNGTRFSASDLTNGADGMLATSSNGSQYSGSRVETPVSYVGEDDEEDDDFNENDEDD

SEQ ID NO: 15763 - protein, 446 aa, Homo Sapiens
MTAKNVGLTSTNAEVRGFIDQNLSPTKGNISFVAFPVSNTNSPTKILPKTLGPINVNVGPQMIISTPQRLTSSGSVLIGSPYTPAPAMVTQTHIAEATGWVPGDRKRARKFIDSDFSESKRSKKGDKNGKGLRHFSMKVCEKVQRKGTTSYNEVADELVSEFTNSNNHLAADSAYDQKNIRRRVYDALNVLMAMNIISKEKKEIKWIGLPTNSAQECQNLEIEKQRRIERIKQKRAQLQELLLQQIAFKNLVQRNRQNEQQNQGPPALNSTIQLPFIIINTSRKTVIDCSISSDKFEYLFNFDNTFEIHDDIEVLKRMGMSFGLESGKCSLEDLKLAKSLVPKALEGYITDISTGPSWLNQGLLLNSTQSVSNLDLTTGATLPQSSVNQGLCLDAEVALATGQFLAPNSHQSSSAASHCSESRGETPCSFNDEDEEDDEEDSSSPE

SEQ ID NO: 15764 - protein, 405 aa, Homo Sapiens
MAKYVSLTEANEELKVLMDENQTSRPVAVHTSTVNPLGKQLLPKTFGQSSVNIDQQVVIGMPQRPAASNIPVVGSPNPPSTHFASQNQHSYSSPPWAGQHNRKGEKNGMGLCRLSMKVWETVQRKGTTSCQEVVGELVAKFRAASNHASPNESAYDVKNIKRRTYDALNVLMAMNIISREKKKIKWIGLTTNSAQNCQNLRVERQKRLERIKQKQSELQQLILQQIAFKNLVLRNQYVEEQVSQRPLPNSVIHVPFIIISSSKKTVINCSISDDKSEYLFKFNSSFEIHDDTEVLMWMGMTFGLESGSCSAEDLKMARNLVPKALEPYVTEMAQGTFGGVFTTAGSRSNGTWLSASDLTNIAIGMLATSSGGSQYSGSRVETPAVEEEEEEDNNDDDLSENDEDD

SEQ ID NO: 15765 - protein, 575 aa, Homo Sapiens
MSHAAEPARDGVEASAEGPRAVFVLLEERRPADSAQLLSLNSLLPESGIVADIELENVLDPDSFYELKSQPLPLRSSLPISLQATPATPATLSASSSAGGSRTPAMSSSSSSRVLLRQQLMRAQAQEQERRERREQAAAAPFPSPAPASPAISVVGVSAGGHTLSRPPPAQVPREVLKVQTHLENPTRYHLQQARRQQVKQYLSTTLGPKLASQALTPPPGPASAQPLPAPEAAHTTGPTGSAPNSPMALLTIGSSSEKEIDDVIDEIISLESSYNDEMLSYLPGGTTGLQLPSTLPVSGNLLDVYSSQGVATPAITVSNSCPAELPNIKREISETEAKALLKERQKKDNHNLIERRRRFNINDRIKELGTLIPKSSDPEMRWNKGTILKASVDYIRKLQKEQQRSKDLESRQRSLEQANRSLQLRIQELELQAQIHGLPVPPTPGLLSLATTSASDSLKPEQLDIEEEGRPGAATFHVGGGPAQNAPHQQPPAPPSDALLDLHFPSDHLGDLGDPFHLGLEDILMEEEEGVVGGLSGGALSPLRAASDPLLSSVSPAVSKASSRRSSFSMEEES

SEQ ID NO: 15766 - protein, 476 aa, Homo Sapiens
MASRIGLRMQLMREQAQQEEQRERMQQQAVMHYMQQQQQQQQQQLGGPPTPAINTPVHFQSPPPVPGEVLKVQSYLENPTSYHLQQSQHQKVREYLSETYGNKFAAHISPAQGSPKPPPAASPGVRAGHVLSSSAGNSAPNSPMAMLHIGSNPERELDDVIDNIMRLDDVLGYINPEMQMPNTLPLSSSHLNVYSSDPQVTASLVGVTSSSCPADLTQKRELTDAESRALAKERQKKDNHNLIERRRRFNINDRIKELGMLIPKANDLDVRWNKGTILKASVDYIRRMQKDLQKSRELENHSRRLEMTNKQLWLRIQELEMQARVHGLPTTSPSGMNMAELAQQVVKQELPSEEGPGEALMLGAEVPDPEPLPALPPQAPLPLPTQPPSPFHHLDFSHSLSFGGREDEGPPGYPEPLAPGHGSPFPSLSKKDLDLMLLDDSLLPLASDPLLSTMSPEASKASSRRSSFSMEEGDVL

SEQ ID NO: 15767 - protein, 347 aa, Homo Sapiens
MTLDHQIINPTLKWSQPAVPSGGPLVQHAHTTLDSDAGLTENPLTKLLAIGKEDDNAQWHMEDVIEDIIGMESSFKEEGADSPLLMQRTLSGSILDVYSGEQGISPINMGLTSASCPSSLPMKREITETDTRALAKERQKKDNHNLIERRRRYNINYRIKELGTLIPKSNDPDMRWNKGTILKASVEYIKWLQKEQQRARELEHRQKKLEQANRRLLLRIQELEIQARTHGLPTLASLGTVDLGAHVTKQQSHPEQNSVDYCQQLTVSQGPSPELCDQAIAFSDPLSYFTDLSFSAALKEEQRLDGMLLDDTISPFGTDPLLSATSPAVSKESSRRSSFSSDDGDEL

SEQ ID NO: 15768 - protein, 401 aa, Homo Sapiens
MVLAQSRVSAGVGSPHCSGSGGGGSDSFPWPASHPGNPQCSFSTAFLASPRLSRGTLAYLPPAPWSSLATPSALLGSSCAPPPPPARCPQPRALSPELGTKAGPRRPHRWELPRSPSQGAQGPAPRRRLLETMKGIVAASGSETEDEDSMDIPLDLSSSAGSGKRRRRGNLPKESVQILRDWLYEHRYNAYPSEQEKALLSQQTHLSTLQVCNWFINARRRLLPDMLRKDGKDPNQFTISRRGAKISETSSVESVMGIKNFMPALEETPFHSCTAGPNPTLGRPLSPKPSSPGSVLARPSVICHTTVTALKDVPFSLCQSVGVGQNTDIQQIAAKNFTDTSLMYPEDTCKSGPSTNTQSGLFNTPPPTPPDLNQDFSGFQLLVDVALKRAAEMELQAKLTA

SEQ ID NO: 15769 - protein, 237 aa, Homo Sapiens
MSDSDLGEDEGLLSLAGKRKRRGNLPKESVKILRDWLYLHRYNAYPSEQEKLSLSGQTNLSVLQICNWFINARRRLLPDMLRKDGKDPNQFTISRRGGKASDVALPRGSSPSVLAVSVPAPTNVLSLSVCSMPLHSGQGEKPAAPFPRGELESPKPLVTPGSTLTLLTRAEAGSPTGGLFNTPPPTPPEQDKEDFSSFQLLVEVALQRAAEMELQKQQDPSLPLLHTPIPLVSENPQ

SEQ ID NO: 15770 - protein, 241 aa, Homo Sapiens
MEAAADGPAETQSPVEKDSPAKTQSPAQDTSIMSRNNADTGRVLALPEHKKKRKGNLPAESVKILRDWMYKHRFKAYPSEEEKQMLSEKTNLSLLQISNWFINARRRILPDMLQQRRNDPIIGHKTGKDAHATHLQSTEASVPAKSGPSGPDNVQSLPLWPLPKGQMSREKQPDPESAPSQKLTGIAQPKKKVKVSVTSPSSPELVSPEEHADFSSFLLLVDAAVQRAAELELEKKQEPNP

SEQ ID NO: 15771 - protein, 185 aa, Homo Sapiens
MEAAADGPAETQSPVEKDSPAKTQSPAQDTSIMSRNNADTGRVLALPEHKKKRKGNLPAESVKILRDWMYKHRFKAYPSEEEKQMLSEKTNLSLLRISNWFINARRRILPDMLQQRRNDPIIGHKTGKDAHATHLQSTEASVPAKSGPVVQTMYKACPCGPCQRARCQERSNQIRSRPLARSSPE

SEQ ID NO: 15772 - protein, 213 aa, Homo Sapiens
MVQSCSAYGCKNRYDKDKPVSFHKFPLTRPSLCKEWEAAVRRKNFKPTKYSSICSEHFTPDCFKRECNNKLLKENAVPTIFLCTEPHDKKEDLLEPQEQLPPPPLPPPVSQVDAAIGLLMPPLQTPVNLSVFCDHNYTVEDTMHQRKRIHQLEQQVEKLRKKLKTAQQRCRRQERQLEKLKEVVHFQKEKDDVSERGYVILPNDYFEIVEVPA

SEQ ID NO: 15773 - protein, 257 aa, Homo Sapiens
MPARCVAAHCGNTTKSGKSLFRFPKDRAVRLLWDRFVRGCRADWYGGNDRSVICSDHFAPACFDVSSVIQKNLRFSQRLRLVAGAVPTLHRVPAPAPKRGEEGDQAGRLDTRGELQAARHSEAAPGPVSCTRPRAGKQAAASQITCENELVQTQPHADNPSNTVTSVPTHCEEGPVHKSTQISLKRPRHRSVGIQAKVKAFGKRLCNATTQTEELWSRTSSLFDIYSSDSETDTDWDIKSEQSDLSYMAVQVKEETC

SEQ ID NO: 15774 - protein, 314 aa, Homo Sapiens
MPGFTCCVPGCYNNSHRDKALHFYTFPKDAELRRLWLKNVSRAGVSGCFSTFQPTTGHRLCSVHFQGGRKTYTVRVPTIFPLRGVNERKVARRPAGAAAARRRQQQQQQQQQQQQQQQQQQQQQQQQQQQQQSSPSASTAQTAQLQPNLVSASAAVLLTLQATVDSSQAPGSVQPAPITPTGEDVKPIDLTVQVEFAAAEGAAAAAAASELQAATAGLEAAECPMGPQLVVVGEEGFPDTGSDHSYSLSSGTTEEELLRKLNEQRDILALMEVKMKEMKGSIRHLRLTEAKLREELREKDRLLAMAVIRKKHGM

SEQ ID NO: 15775 - protein, 761 aa, Homo Sapiens
MPNFCAAPNCTRKSTQSDLAFFRFPRDPARCQKWVENCRRADLEDKTPDQLNKHYRLCAKHFETSMICRTSPYRTVLRDNAIPTIFDLTSHLNNPHSRHRKRIKELSEDEIRTLKQKKIDETSEQEQKHKETNNSNAQNPSEEEGEGQDEDILPLTLEEKENKEYLKSLFEILILMGKQNIPLDGHEADEIPEGLFTPDNFQALLECRINSGEEVLRKRFETTAVNTLFCSKTQQRQMLEICESCIREETLREVRDSHFFSIITDDVVDIAGEEHLPVLVRFVDESHNLREEFIGFLPYEADAEILAVKFHTMITEKWGLNMEYCRGQAYIVSSGFSSKMKVVASRLLEKYPQAIYTLCSSCALNMWLAKSVPVMGVSVALGTIEEVCSFFHRSPQLLLELDNVISVLFQNSKERGKELKEICHSQWTGRHDAFEILVELLQALVLCLDGINSDTNIRWNNYIAGRAFVLCSAVSDFDFIVTIVVLKNVLSFTRAFGKNLQGQTSDVFFAAGSLTAVLHSLNEVMENIEVYHEFWFEEATNLATKLDIQMKLPGKFRRAHQGNLESQLTSESYYKETLSVPTVEHIIQELKDIFSEQHLKALKCLSLVPSVMGQLKFNTSEEHHADMYRSDLPNPDTLSAELHCWRIKWKHRGKDIELPSTIYEALHLPDIKFFPNVYALLKVLCILPVMKVENERYENGRKRLKAYLRNTLTDQRSSNLALLNINFDIKHDLDLMVDTYIKLYTSKSELPTDNSETVENT

SEQ ID NO: 15776 - protein, 228 aa, Homo Sapiens
MPTNCAAAGCATTYNKHINISFHRFPLDPKRRKEWVRLVRRKNFVPGKHTFLCSKHFEASCFDLTGQTRRLKMDAVPTIFDFCTHIKSMKLKSRNLLKKNNSCSPAGPSNLKSNISSQQVLLEHSYAFRNPMEAKKRIIKLEKEIASLRRKMKTCLQKERRATRRWIKATCLVKNLEANSVLPKGTSEHMLPTALSSLPLEDFKILEQDQQDKTLLSLNLKQTKSTFI

SEQ ID NO: 15777 - protein, 239 aa, Homo Sapiens
MPKSCAARQCCNRYSSRRKQLTFHRFPFSRPELLKEWVLNIGRGNFKPKQHTVICSEHFRPECFSAFGNRKNLKHNAVPTVFAFQDPTQQVRENTDPASERGNASSSQKEKVLPEAGAGEDSPGRNMDTALEELQLPPNAEGHVKQVSPRRPQATEAVGRPTGPAGLRRTPNKQPSDHSYALLDLDSLKKKLFLTLKENEKLRKRLQAQRLVMRRMSSRLRACKGHQGLQARLGPEQQS

SEQ ID NO: 15778 - protein, 577 aa, Homo Sapiens
MVICCAAVNCSNRQGKGEKRAVSFHRFPLKDSKRLIQWLKAVQRDNWTPTKYSFLCSEHFTKDSFSKRLEDQHRLLKPTAVPSIFHLTEKKRGAGGHGRTRRKDASKATGGVRGHSSAATSRGAAGWSPSSSGNPMAKPESRRLKQAALQGEATPRAAQEAASQEQAQQALERTPGDGLATMVAGSQGKAEASATDAGDESATSSIEGGVTDKSGISMDDFTPPGSGACKFIGSLHSYSFSSKHTRERPSVPREPIDRKRLKKDVEPSCSGSSLGPDKGLAQSPPSSSLTATPQKPSQSPSAPPADVTPKPATEAVQSEHSDASPMSINEVILSASGACKLIDSLHSYCFSSRQNKSQVCCLREQVEKKNGELKSLRQRVSRSDSQVRKLQEKLDELRRVSVPYPSSLLSPSREPPKMNPVVEPLSWMLGTWLSDPPGAGTYPTLQPFQYLEEVHISHVGQPMLNFSFNSFHPDTRKPMHRECGFIRLKPDTNKVAFVSAQNTGVVEVEEGEVNGQELCIASHSIARISFAKEPHVEQITRKFRLNSEGKLEQTVSMATTTQPMTQHLHVTYKKVTP

SEQ ID NO: 15779 - protein, 395 aa, Homo Sapiens
MPRYCAAICCKNRRGRNNKDRKLSFYPFPLHDKERLEKWLKNMKRDSWVPSKYQFLCSDHFTPDSLDIRWGIRYLKQTAVPTIFSLPEDNQGKDPSKKKSQKKNLEDEKEVCPKAKSEESFVLNETKKNIVNTDVPHQHPELLHSSSLVKPPAPKTGSIQNNMLTLNLVKQHTGKPESTLETSVNQDTGRGGFHTCFENLNSTTITLTTSNSESIHQSLETQEVLEVTTSHLANPNFTSNSMEIKSAQENPFLFSTINQTVEELNTNKESVIAIFVPAENSKPSVNSFISAQKETTEMEDTDIEDSLYKDVDYGTEVLQIEHSYCRQDINKEHLWQKVSKLHSKITLLELKEQQTLGRLKSLEALIRQLKQENWLSEENVKIIENHFTTYEVTMI

SEQ ID NO: 15780 - protein, 222 aa, Homo Sapiens
MVKCCSAIGCASRCLPNSKLKGLTFHVFPTDENIKRKWVLAMKRLDVNAAGIWEPKKGDVLCSRHFKKTDFDRSAPNIKLKPGVIPSIFDSPYHLQGKREKLHCRKNFTLKTVPATNYNHHLVGASSCIEEFQSQFIFEHSYSVMDSPKKLKHKLDHVIGELEDTKESLRNVLDREKRFQKSLRKTIRELKDECLISQETANRLDTFCWDCCQESIEQDYIS

SEQ ID NO: 15781 - protein, 309 aa, Homo Sapiens
MPRHCSAAGCCTRDTRETRNRGISFHRLPKKDNPRRGLWLANCQRLDPSGQGLWDPASEYIYFCSKHFEEDCFELVGISGYHRLKEGAVPTIFESFSKLRRTTKTKGHSYPPGPAEVSRLRRCRKRCSEGRGPTTPFSPPPPADVTCFPVEEASAPATLPASPAGRLEPGLSSPFSDLLGPLGAQADEAGCSAQPSPERQPSPLEPRPVSPSAYMLRLPPPAGAYIQNEHSYQVGSALLWKRRAEAALDALDKAQRQLQACKRREQRLRLRLTKLQQERAREKRAQADARQTLKEHVQDFAMQLSSSMA

SEQ ID NO: 15782 - protein, 274 aa, Homo Sapiens
MPKYCRAPNCSNTAGRLGADNRPVSFYKFPLKDGPRLQAWLQHMGCEHWVPSCHQHLCSEHFTPSCFQWRWGVRYLRPDAVPSIFSRGPPAKSQRRTRSTQKPVSPPPPLQKNTPLPQSPAIPVSGPVRLVVLGPTSGSPKTVATMLLTPLAPAPTPERSQPEVPAQQAQTGLGPVLGALQRRVRRLQRCQERHQAQLQALERLAQQLHGESLLARARRGLQRLTTAQTLGPEESQTFTIICGGPDIAMVLAQDPAPATVDAKPELLDTRIPSA

SEQ ID NO: 15783 - protein, 903 aa, Homo Sapiens
MTRSCSAVGCSTRDTVLSRERGLSFHQFPTDTIQRSKWIRAVNRVDPRSKKIWIPGPGAILCSKHFQESDFESYGIRRKLKKGAVPSVSLYKIPQGVHLKGKARQKILKQPLPDNSQEVATEDHNYSLKTPLTIGAEKLAEVQQMLQVSKKRLISVKNYRMIKKRKGLRLIDALVEEKLLSEETECLLRAQFSDFKWELYNWRETDEYSAEMKQFACTLYLCSSKVYDYVRKILKLPHSSILRTWLSKCQPSPGFNSNIFSFLQRRVENGDQLYQYCSLLIKSMPLKQQLQWDPSSHSLQGFMDFGLGKLDADETPLASETVLLMAVGIFGHWRTPLGYFFVNRASGYLQAQLLRLTIGKLSDIGITVLAVTSDATAHSVQMAKALGIHIDGDDMKCTFQHPSSSSQQIAYFFDSCHLLRLIRNAFQNFQSIQFINGIAHWQHLVELVALEEQELSNMERIPSTLANLKNHVLKVNSATQLFSESVASALEYLLSLDLPPFQNCIGTIHFLRLINNLFDIFNSRNCYGKGLKGPLLPETYSKINHVLIEAKTIFVTLSDTSNNQIIKGKQKLGFLGFLLNAESLKWLYQNYVFPKVMPFPYLLTYKFSHDHLELFLKMLRQVLVTSSSPTCMAFQKAYYNLETRYKFQDEVFLSKVSIFDISIARRKDLALWTVQRQYGVSVTKTVFHEEGICQDWSHCSLSEALLDLSDHRRNLICYAGYVANKLSALLTCEDCITALYASDLKASKIGSLLFVKKKNGLHFPSESLCRVINICERVVRTHSRMAIFELVSKQRELYLQQKILCELSGHINLFVDVNKHLFDGEVCAINHFVKLLKDIIICFLNIRAKNVAQNPLKHHSERTDMKTLSRKHWSSVQDYKCSSFANTSSKFRHLLSNDGYPFK

SEQ ID NO: 15784 - protein, 539 aa, Homo Sapiens
MGSPEDDLIGIPFPDHSSELLSCLNEQRQLGHLCDLTIRTQGLEYRTHRAVLAACSHYFKKLFTEGGGGAVMGAGGSGTATGGAGAGVCELDFVGPEALGALLEFAYTATLTTSSANMPAVLQAARLLEIPCVIAACMEILQGSGLEAPSPDEDDCERARQYLEAFATATASGVPNGEDSPPQVPLPPPPPPPPRPVARRSRKPRKAFLQTKGARANHLVPEVPTVPAHPLTYEEEEVAGRVGSSGGSGPGDSYSPPTGTASPPEGPQSYEPYEGEEEEEELVYPPAYGLAQGGGPPLSPEELGSDEDAIDPDLMAYLSSLHQDNLAPGLDSQDKLVRKRRSQMPQECPVCHKIIHGAGKLPRHMRTHTGEKPFACEVCGVRFTRNDKLKIHMRKHTGERPYSCPHCPARFLHSYDLKNHMHLHTGDRPYECHLCHKAFAKEDHLQRHLKGQNCLEVRTRRRRKDDAPPHYPPPSTAAASPAGLDLSNGHLDTFRLSLARFWEQSAPTGPPVSTPGPPDDDEEEGAPTTPQAEGAMESS

SEQ ID NO: 15785 - protein, 490 aa, Homo Sapiens
MEQKPSKVECGSDPEENSARSPDGKRKRKNGQCSLKTSMSGYIPSYLDKDEQCVVCGDKATGYHYRCITCEGCKGFFRRTIQKNLHPTYSCKYDSCCVIDKITRNQCQLCRFKKCIAVGMAMDLVLDDSKRVAKRKLIEQNRERRRKEEMIRSLQQRPEPTPEEWDLIHIATEAHRSTNAQGSHWKQRRKFLPDDIGQSPIVSMPDGDKVDLEAFSEFTKIITPAITRVVDFAKKLPMFSELPCEDQIILLKGCCMEIMSLRAAVRYDPESDTLTLSGEMAVKREQLKNGGLGVVSDAIFELGKSLSAFNLDDTEVALLQAVLLMSTDRSGLLCVDKIEKSQEAYLLAFEHYVNHRKHNIPHFWPKLLMKEREVQSSILYKGAAAEGRPGGSLGVHPEGQQLLGMHVVQGPQVRQLEQQLGEAGSLQGPVLQHQSPKSPQQRLLELLHRSGILHARAVCGEDDSSEADSPSSSEEEPEVCEDLAGNAASP

SEQ ID NO: 15786 - protein, 461 aa, Homo Sapiens
MTPNSMTENGLTAWDKPKHCPDREHDWKLVGMSEACLHRKSHSERRSTLKNEQSSPHLIQTTWTSSIFHLDHDDVNDQSVSSAQTFQTEEKKCKGYIPSYLDKDELCVVCGDKATGYHYRCITCEGCKGFFRRTIQKNLHPSYSCKYEGKCVIDKVTRNQCQECRFKKCIYVGMATDLVLDDSKRLAKRKLIEENREKRRREELQKSIGHKPEPTDEEWELIKTVTEAHVATNAQGSHWKQKRKFLPEDIGQAPIVNAPEGGKVDLEAFSHFTKIITPAITRVVDFAKKLPMFCELPCEDQIILLKGCCMEIMSLRAAVRYDPESETLTLNGEMAVTRGQLKNGGLGVVSDAIFDLGMSLSSFNLDDTEVALLQAVLLMSSDRPGLACVERIEKYQDSFLLAFEHYINYRKHHVTHFWPKLLMKVTDLRMIGACHASRFLHMKVECPTELFPPLFLEVFED

SEQ ID NO: 15787 - protein, 330 aa, Homo Sapiens
MEHLGPHHLHPGHAEPISFGIDQILNSPDQGGCMGPASRLQDGEYGLGCLVGGAYTYGGGGSAAATGAGGAGAYGTGGPGGPGGPAGGGGACSMGPLTGSYNVNMALAGGPGPGGGGGSSGGAGALSAAGVIRVPAHRPLAGAVAHPQPLATGLPTVPSVPAMPGVNNLTGLTFPWMESNRRYTKDRFTGHPYQNRTPPKKKKPRTSFTRLQICELEKRFHRQKYLASAERAALAKALKMTDAQVKTWFQNRRTKWRRQTAEEREAERQQANRILLQLQQEAFQKSLAQPLPADPLCVHNSSLFALQNLQPWSDDSTKITSVTSVASACE

SEQ ID NO: 15788 - protein, 284 aa, Homo Sapiens
MEPGMLGPHNLPHHEPISFGIDQILSGPETPGGGLGLGRGGQGHGENGAFSGGYHGASGYGPAGSLAPLPGSSGVGPGGVIRVPAHRPLPVPPPAGGAPAVPGPSGLGGAGGLAGLTFPWMDSGRRFAKDRLTAALSPFSGTRRIGHPYQNRTPPKRKKPRTSFSRSQVLELERRFLRQKYLASAERAALAKALRMTDAQVKTWFQNRRTKWRRQTAEEREAERHRAGRLLLHLQQDALPRPLRPPLPPDPLCLHNSSLFALQNLQPWAEDNKVASVSGLASVV

SEQ ID NO: 15789 - protein, 291 aa, Homo Sapiens
MEAPASAQTPHPHEPISFGIDQILNSPDQDSAPAPRGPDGASYLGGPPGGRPGATYPSLPASFAGLGAPFEDAGSYSVNLSLAPAGVIRVPAHRPLPGAVPPPLPSALPAMPSVPTVSSLGGLNFPWMESSRRFVKDRFTAAAALTPFTVTRRIGHPYQNRTPPKRKKPRTSFSRVQICELEKRFHRQKYLASAERAALAKSLKMTDAQVKTWFQNRRTKWRRQTAEEREAERQQASRLMLQLQHDAFQKSLNDSIQPDPLCLHNSSLFALQNLQPWEEDSSKVPAVTSLV

SEQ ID NO: 15790 - protein, 510 aa, Homo Sapiens
MAADSDDGAVSAPAASDGGVSKSTTSGEELVVQVPVVDVQSNNFKEMWPSLLLAIKTANFVAVDTELSGLGDRKSLLNQCIEERYKAVCHAARTRSILSLGLACFKRQPDKGEHSYLAQVFNLTLLCMEEYVIEPKSVQFLIQHGFNFNQQYAQGIPYHKGNDKGDESQSQSVRTLFLELIRARRPLVLHNGLIDLVFLYQNFYAHLPESLGTFTADLCEMFPAGIYDTKYAAEFHARFVASYLEYAFRKCERENGKQRAAGSPHLTLEFCNYPSSMRDHIDYRCCLPPATHRPHPTSICDNFSAYGWCPLGPQCPQSHDIDLIIDTDEAAAEDKRRRRRRREKRKRALLNLPGTQTSGEAKDGPPKKQVCGDSIKPEETEQEVAADETRNLPHSKQGNKNDLEMGIKAARPEIADRATSEVPGSQASPNPVPGDGLHRAGFDAFMTGYVMAYVEVSQGPQPCSSGPWLPECHNKVYLSGKAVPLTVAKSQFSRSSKAHNQKMKLTWGSS

SEQ ID NO: 15791 - protein, 1378 aa, Homo Sapiens
MSLERELRQLSKAKAKAQRAGQRREEAALCHQLGELLAGHGRYAEALEQHWQELQLRERADDPLGCAVAHRKIGERLAEMEDYPAALQHQHQYLELAHSLRNHTELQRAWATIGRTHLDIYDHCQSRDALLQAQAAFEKSLAIVDEELEGTLAQGELNEMRTRLYLNLGLTFESLQQTALCNDYFRKSIFLAEQNHLYEDLFRARYNLGTIHWRAGQHSQAMRCLEGARECAHTMRKRFMESECCVVIAQVLQDLGDFLAAKRALKKAYRLGSQKPVQRAAICQNLQHVLAVVRLQQQLEEAEGRDPQGAMVICEQLGDLFSKAGDFPRAAEAYQKQLRFAELLDRPGAERAIIHVSLATTLGDMKDHHGAVRHYEEELRLRSGNVLEEAKTWLNIALSREEAGDAYELLAPCFQKALSCAQQAQRPQLQRQVLQHLHTVQLRLQPQEAPETETRLRELSVAEDEDEEEEAEEAAATAESEALEAGEVELSEGEDDTDGLTPQLEEDEELQGHLGRRKGSKWNRRNDMGETLLHRACIEGQLRRVQDLVRQGHPLNPRDYCGWTPLHEACNYGHLEIVRFLLDHGAAVDDPGGQGCEGITPLHDALNCGHFEVAELLLERGASVTLRTRKGLSPLETLQQWVKLYRRDLDLETRQKARAMEMLLQAAASGQDPHSSQAFHTPSSLLFDPETSPPLSPCPEPPSNSTRLPEASQAHVRVSPGQAAPAMARPRRSRHGPASSSSSSEGEDSAGPARPSQKRPRCSATAQRVAAWTPGPASNREAATASTSRAAYQAAIRGVGSAQSRLGPGPPRGHSKALAPQAALIPEEECLAGDWLELDMPLTRSRRPRPRGTGDNRRPSSTSGSDSEESRPRARAKQVRLTCMQSCSAPVNAGPSSLASEPPGSPSTPRVSEPSGDSSAAGQPLGPAPPPPIRVRVQVQDHLFLIPVPHSSDTHSVAWLAEQAAQRYYQTCGLLPRLTLRKEGALLAPQDLIPDVLQSNDEVLAEVTSWDLPPLTDRYRRACQSLGQGEHQQVLQAVELQGLGLSFSACSLALDQAQLTPLLRALKLHTALRELRLAGNRLGDKCVAELVAALGTMPSLALLDLSSNHLGPEGLRQLAMGLPGQATLQSLEELDLSMNPLGDGCGQSLASLLHACPLLSTLRLQACGFGPSFFLSHQTALGSAFQDAEHLKTLSLSYNALGAPALARTLQSLPAGTLLHLELSSVAAGKGDSDLMEPVFRYLAKEGCALAHLTLSANHLGDKAVRDLCRCLSLCPSLISLDLSANPEISCASLEELLSTLQKRPQGLSFLGLSGCAVQGPLGLGLWDKIAAQLRELQLCSRRLCAEDRDALRQLQPSRPGPGECTLDHGSKLFFRRL

SEQ ID NO: 15792 - protein, 1045 aa, Homo Sapiens
MGSQPPLGSPLSREEGEAPPPAPASEGRRRSRRVRLRGSCRHRPSFLGCRELAASAPARPAPASSEIMASAAKEFKMDNFSPKAGTSKLQQTVPADASPDSKCPICLDRFDNVSYLDRCLHKFCFRCVQEWSKNKAECPLCKQPFDSIFHSVRAEDDFKEYVLRPSYNGSFVTPDRRFRYRTTLTRERNASVYSPSGPVNRRTTTPPDSGVLFEGLGISTRPRDVEIPQFMRQIAVRRPTTADERSLRKIQEQDIINFRRTLYRAGARVRNIEDGGRYRDISAEFFRRNPACLHRLVPWLKRELTVLFGAHGSLVNIVQHIIMSNVTRYDLESQAFVSDLRPFLLNRTEHFIHEFISFARSPFNMAAFDQHANYDCPAPSYEEGSHSDSSVITISPDEAETQELDINVATVSQAPWDDETPGPSYSSSEQVHVTMSSLLNTSDSSDEELVTGGATSQIQGVQTNDDLNNDSDDSSDNCVIVGFVKPLAERTPELVELSSDSEDLGSYEKMETVKTQEQEQSYSSGDSDVSRCSSPHSVLGKDEQINKGHCDSSTRIKSKKEEKRSTSLSSPRNLNSSVRGDRVYSPYNHRHRKRGRSRSSDSRSQSRSGHDQKNHRKHHGKKRMKSKRSRSRESSRPRGRRDKKRSRTRDSSWSRRSQTLSLSSESTSRSRSRSSDHGKRRSRSRNRDRYYLRNNYGSRYKWEYTYYSRNKDRDGYESSYRRRTLSRAHYSRQSSSPEFRVQSFSERTNARKKNNHSERKYYYYERHRSRSLSSNRSRTASTGTDRVRNEKPGGKRKYKTRHLEGTNEVAQPSREFASKAKDSHYQKSSSKLDGNYKNESDTFSDSRSSDRETKHKRRKRKTRSLSVEIVYEGKATDTTKHHKKKKKKHKKKHKKHHGDNASRSPVVITIDSDSDKDSEVKEDTECDNSGPQDPLQNEFLAPSLEPFETKDVVTIEAEFGVLDKECDIATLSNNLNNANKTVDNIPPLAASVEQTLDVREESTFVSDLENQPSNIVSLQTEPSRQLPSPRTSLMSVCLGRDCDMS

SEQ ID NO: 15793 - protein, 526 aa, Homo Sapiens
MDVRFYPPPAQPAAAPDAPCLGPSPCLDPYYCNKFDGENMYMSMTEPSQDYVPASQSYPGPSLESEDFNIPPITPPSLPDHSLVHLNEVESGYHSLCHPMNHNGLLPFHPQNMDLPEITVSNMLGQDGTLLSNSISVMPDIRNPEGTQYSSHPQMAAMRPRGQPADIRQQPGMMPHGQLTTINQSQLSAQLGLNMGGSNVPHNSPSPPGSKSATPSPSSSVHEDEGDDTSKINGGEKRPASDMGKKPKTPKKKKKKDPNEPQKPVSAYALFFRDTQAAIKGQNPNATFGEVSKIVASMWDGLGEEQKQVYKKKTEAAKKEYLKQLAAYRASLVSKSYSEPVDVKTSQPPQLINSKPSVFHGPSQAHSALYLSSHYHQQPGMNPHLTAMHPSLPRNIAPKPNNQMPVTVSIANMAVSPPPPLQISPPLHQHLNMQQHQPLTMQQPLGNQLPMQVQSALHSPTMQQGFTLQPDYQTIINPTSTAAQVVTQAMEYVRSGCRNPPPQPVDWNNDYCSSGGMQRDKALYLT

SEQ ID NO: 15794 - protein, 488 aa, Homo Sapiens
MQQTRTEAVAGAFSRCLGFCGMRLGLLLLARHWCIAGVFPQKFDGDSAYVGMSDGNPELLSTSQTYNGQSENNEDYEIPPITPPNLPEPSLLHLGDHEASYHSLCHGLTPNGLLPAYSYQAMDLPAIMVSNMLAQDSHLLSGQLPTIQEMVHSEVAAYDSGRPGPLLGRPAMLASHMSALSQSQLISQMGIRSSIAHSSPSPPGSKSATPSPSSSTQEEESEVHFKISGEKRPSADPGKKAKNPKKKKKKDPNEPQKPVSAYALFFRDTQAAIKGQNPSATFGDVSKIVASMWDSLGEEQKQSSPDQGETKSTQANPPAKMLPPKQPMYAMPGLASFLTPSDLQAFRSGASPASLARTLGSKSLLPGLSASPPPPPSFPLSPTLHQQLSLPPHAQGALLSPPVSMSPAPQPPVLPTPMALQVQLAMSPSPPGPQDFPHISEFPSSSGSCSPGPSNPTSSGDWDSSYPSGECGISTCSLLPRDKSLYLT

SEQ ID NO: 15795 - protein, 576 aa, Homo Sapiens
MDVRFYPAAAGDPASLDFAQCLGYYGYSKFGNNNNYMNMAEANNAFFAASEQTFHTPSLGDEEFEIPPITPPPESDPALGMPDVLLPFQALSDPLPSQGSEFTPQFPPQSLDLPSITISRNLVEQDGVLHSSGLHMDQSHTQVSQYRQDPSLIMRSIVHMTDAARSGVMPPAQLTTINQSQLSAQLGLNLGGASMPHTSPSPPASKSATPSPSSSINEEDADEANRAIGEKRAAPDSGKKPKTPKKKKKKDPNEPQKPVSAYALFFRDTQAAIKGQNPNATFGEVSKIVASMWDSLGEEQKQVYKRKTEAAKKEYLKALAAYRASLVSKAAAESAEAQTIRSVQQTLASTNLTSSLLLNTPLSQHGTVSASPQTLQQSLPRSIAPKPLTMRLPMNQIVTSVTIAANMPSNIGAPLISSMGTTMVGSAPSTQVSPSVQTQQHQMQLQQQQQQQQQQMQQMQQQQLQQHQMHQQIQQQMQQQHFQHHMQQHLQQQQQHLQQQINQQQLQQQLQQRLQLQQLQHMQHQSQPSPRQHSPVASQITSPIPAIGSPQPASQQHQSQIQSQTQTQVLSQVSIF

SEQ ID NO: 15796 - protein, 621 aa, Homo Sapiens
MEFPGGNDNYLTITGPSHPFLSGAETFHTPSLGDEEFEIPPISLDSDPSLAVSDVVGHFDDLADPSSSQDGSFSAQYGVQTLDMPVGMTHGLMEQGGGLLSGGLTMDLDHSIGTQYSANPPVTIDVPMTDMTSGLMGHSQLTTIDQSELSSQLGLSLGGGTILPPAQSPEDRLSTTPSPTSSLHEDGVEDFRRQLPSQKTVVVEAGKKQKAPKKRKKKDPNEPQKPVSAYALFFRDTQAAIKGQNPNATFGEVSKIVASMWDSLGEEQKQVYKRKTEAAKKEYLKALAAYKDNQECQATVETVELDPAPPSQTPSPPPMATVDPASPAPASIEPPALSPSIVVNSTLSSYVANQASSGAGGQPNITKLIITKQMLPSSITMSQGGMVTVIPATVVTSRGLQLGQTSTATIQPSQQAQIVTRSVLQAAAAAAAAASMQLPPPRLQPPPLQQMPQPPTQQQVTILQQPPPLQAMQQPPPQKVRINLQQQPPPLQIKSVPLPTLKMQTTLVPPTVESSPERPMNNSPEAHTVEAPSPETICEMITDVVPEVESPSQMDVELVSGSPVALSPQPRCVRSGCENPPIVSKDWDNEYCSNECVVKHCRDVFLAWVASRNSNTVVFVK

SEQ ID NO: 15797 - protein, 393 aa, Homo Sapiens [sequence omitted]

SEQ ID NO: 15798 - protein, 680 aa, Homo Sapiens
MNFETSRCATLQYCPDPYIQRFVETPAHFSWKESYYRSTMSQSTQTNEFLSPEVFQHIWDFLEQPICSVQPIDLNFVDEPSEDGATNKIEISMDCIRMQDSDLSDPMWPQYTNLGLLNSMDQQIQNGSSSTSPYNTDHAQNSVTAPSPYAQPSSTFDALSPSPAIPSNTDYPGPHSFDVSFQQSSTAKSATWTYSTELKKLYCQIAKTCPIQIKVMTPPPQGAVIRAMPVYKKAEHVTEVVKRCPNHELSREFNEGQIAPPSHLIRVEGNSHAQYVEDPITGRQSVLVPYEPPQVGTEFTTVLYNFMCNSSCVGGMNRRPILIIVTLETRDGQVLGRRCFEARICACPGRDRKADEDSIRKQQVSDSTKNGDGTKRPFRQNTHGIQMTSIKKRRSPDDELLYLPVRGRETYEMLLKIKESLELMQYLPQHTIETYRQQQQQQHQHLLQKQTSIQSPSSYGNSSPPLNKMNSMNKLPSVSQLINPQQRNALTPTTIPDGMGANIPMMGTHMPMAGDMNGLSPTQALPPPLSMPSTSHCTPPPPYPTDCSIVSFLARLGCSSCLDYFTTQGLTTIYQIEHYSMDDLASLKIPEQFRHAIWKGILDHRQLHEFSSPSHLLRTPSSASTVSVGSSETRGERVIDAVRFTLRQTISFPPRDEWNDFNFDMDARRNKQQRIKEEGE

SEQ ID NO: 15799 - protein, 636 aa, Homo Sapiens
MAQSTATSPDGGTTFEHLWSSLEPDSTYFDLPQSSRGNNEVVGGTDSSMDVFHLEGMTTSVMAQFNLLSSTMDQMSSRAASASPYTPEHAASVPTHSPYAQPSSTFDTMSPAPVIPSNTDYPGPHHFEVTFQQSSTAKSATWTYSPLLKKLYCQIAKTCPIQIKVSTPPPPGTAIRAMPVYKKAEHVTDVVKRCPNHELGRDFNEGQSAPASHLIRVEGNNLSQYVDDPVTGRQSVVVPYEPPQVGTEFTTILYNFMCNSSCVGGMNRRPILIIITLEMRDGQVLGRRSFEGRICACPGRDRKADEDHYREQQALNESSAKNGAASKRAFKQSPPAVPALGAGVKKRRHGDEDTYYLQVRGRENFEILMKLKESLELMELVPQPLVDSYRQQQQLLQRPSHLQPPSYGPVLSPMNKVHGGMNKLPSVNQLVGQPPPHSSAATPNLGPVGPGMLNNHGHAVPANGEMSSSHSAQSMVSGSHCTPPPPYHADPSLVSFLTGLGCPNCIEYFTSQGLQSIYHLQNLTIEDLGALKIPEQYRMTIWRGLQDLKQGHDYSTAQQLLRSSNAATISIGGSGELQRQRVMEAVHFRVRHTITIPNRGGPGGGPDEWADFGFDLPDCKARKQPIKEEFTEAEIH

SEQ ID NO: 15800 - protein, 411 aa, Homo Sapiens
MLSLREQQLQVWFKNRRAKLARERRLQQQPQRVPGQRGRGARAAPLVPAASASAPQRGPSGILPAAEPTICSLHQAWGGPGCRAQKGIPAALSPGPGPIPAPIPGPAQIPGPLPGSIPGPIPGPAQIPSPIPAPIPGPISGPVQIPGPFRGPIPGPISGPAPIPGPISGPFSGPNPGPIPGPNPGPIPGPISGPIPGPISVPIPGPIPGPISGPISGPNPGPIPGPIPGPISGPNPGPIPGPISGPNPGLIPGPIPGPISGPGPIIGPIPSPAQIPGPGRLQGPGPILSPGRMRSPGSLPGLAPILGPGSGPGSGSVPAPIPGPGSLPAPAPLWPQSPDASDFLPDTQLFPHFTELLLPLDPLEGSSVSTMTSQYQEGDDSMGKKHSGSQPQEEGGSVNENHSGPRLLLDL

SEQ ID NO: 15801 - protein, 258 aa, Homo Sapiens
MTHDKSWRRCSISGSTKCRCGSRIAGPNALGSGGSRSSSSSSRSILSSSILSSSIPSSSSSSSSPSSSHSSSSPSSSHSSSSPSSSSSTSSPSSSSSSSSSSSPSSSNSSSSSSSSSPSSSSSSSSSSPSSSSSSPSSSSSSSSSSPSSSSSSPSSSSSSSSSSSSSPSSSSPSSSGSSPSSSNSSPSSSSSSPSSSSSSPSPRSSSPSSSSSSTSSPSTSSPSSSSPSSSSPSSSCPSAALGRRPQSPQSSHCAPFP

SEQ ID NO: 15802 - protein, 1200 aa, Homo Sapiens
MGDQQLYKTNHVAHGSENLFYQQPPLGVHSGLNHNYGNAVTGGGMDAPQASPISPHFPQDTRDGLGLPVGSKNLGQMDTSRQGGWGSHAGPGNHVQLRGNLANSNMMWGAPAQAEPTDGYQYTYSQASEIRTQKLTSGVLHKLDSFTQVFANQNLRIQVNNMAQVLHTQSAVMDGAPDSALRQLLSQKPMEPPAPAIPSRYQQVPQQPHPGFTGGLSKPALQVGQHPTQGHLYYDYQQPLAQVPVQGGQPLQAPQMLSQHMQQMQQHQYYPPQQQQQAGQQRISMQEIQTQPQQIRPSQPQPPPQQQQPQQLQLQQRQGSMQIPQYYQPQPMMQHLQEQQQQQMHLQPPSYHRDPHQYTPEQAHTVQLIPLGSMSQYYYQEPQQPYSHPLYQQSHLSQHQQREDSQLKTYSSDRQAQAMLSSHGDLGPPDTGMGDPASSDLTRVSSTLPHRPLLSPSGIHLNNMGPQHQQLSPSAMWPQMHLPDGRAQPGSPESSGQPKGAFGEQFDAKNKLTCSICLKEFKNLPALNGHMRSHGGMRASPNLKQEEGEKVLPPQPQPPLPPPPPPPPPPQLPPEAESLTPMVMPVSVPVKLLPPKPSSQGFTNSTVAAPSARDKPASSMSDDEMPVLEIPRKHQPSVPKAEEPLKTVQEKKKFRHRPEPLFIPPPPSYNPNPAASYSGATLYQSQLRSPRVLGDHLLLDPTHELPPYTPPPMLSPVRQGSGLFSNVLISGHGPGAHPQLPLTPLTPTPRVLLCRSNSIDGSNVTVTPGPGEQTVDVEPRINIGLRFQAEIPELQDISALAQDTHKATLVWKPWPELENHDLQQRVENLLNLCCSSALPGGGTNSEFALHSLFEAKGDVMVALEMLLLRKPVRLKCHPLANYHYAGSDKWTSLERKLFNKALATYSKDFIFVQKMVKSKTVAQCVEYYYTWKKIMRLGRKHRTRLAEIIDDCVTSEEEEELEEEEEEDPEEDRKSTKEEESEVPKSPEPPPVPVLAPTEGPPLQALGQPSGSFICEMPNCGAVFSSRQALNGHARIHGGTNQVTKARGAIPSGKQKPGGTQSGYCSVKSSPSHSTTSGETDPTTIFPCKECGKVFFKIKSRNAHMKTHRQQEEQQRQKAQKAAFAAEMAATIERTTGPVGAPGLLPLDQLSLIKPIKDVDILDDDVVQQLGGVMEEAEVVDTDLLLDDQDSVLLQGDAEL

SEQ ID NO: 15803 - protein, 1281 aa, Homo Sapiens
MVRKKNPPLRNVASEGEGQILEPIGTESKVSGKNKEFSADQMSENTDQSDAAELNHKEEHSLHVQDPSSSSKKDLKSAVLSEKAGFNYESPSKGGNFPSFPHDEVTDRNMLAFSSPAAGGVCEPLKSPQRAEADDPQDMACTPSGDSLETKEDQKMSPKATEETGQAQSGQANCQGLSPVSVASKNPQVPSDGGVRLNKSKTDLLVNDNPDPAPLSPELQDFKCNICGYGYYGNDPTDLIKHFRKYHLGLHNRTRQDAELDSKILALHNMVQFSHSKDFQKVNRSVFSGVLQDINSSRPVLLNGTYDVQVTSGGTFIGIGRKTPDCQGNTKYFRCKFCNFTYMGNSSTELEQHFLQTHPNKIKASLPSSEVAKPSEKNSNKSIPALQSSDSGDLGKWQDKITVKAGDDTPVGYSVPIKPLDSSRQNGTEATSYYWCKFCSFSCESSSSLKLLEHYGKQHGAVQSGGLNPELNDKLSRGSVINQNDLAKSSEGETMTKTDKSSSGAKKKDFSSKGAEDNMVTSYNCQFCDFRYSKSHGPDVIVVGPLLRHYQQLHNIHKCTIKHCPFCPRGLCSPEKHLGEITYPFACRKSNCSHCALLLLHLSPGAAGSSRVKHQCHQCSFTTPDVDVLLFHYESVHESQASDVKQEANHLQGSDGQQSVKESKEHSCTKCDFITQVEEEISRHYRRAHSCYKCRQCSFTAADTQSLLEHFNTVHCQEQDITTANGEEDGHAISTIKEEPKIDFRVYNLLTPDSKMGEPVSESVVKREKLEEKDGLKEKVWTESSSDDLRNVTWRGADILRGSPSYTQASLGLLTPVSGTQEQTKTLRDSPNVEAAHLARPIYGLAVETKGFLQGAPAGGEKSGALPQQYPASGENKSKDESQSLLRRRRGSGVFCANCLTTKTSLWRKNANGGYVCNACGLYQKLHSTPRPLNIIKQNNGEQIIRRRTRKRLNPEALQAEQLNKQQRGSNEEQVNGSPLERRSEDHLTESHQREIPLPSLSKYEAQGSLTKSHSAQQPVLVSQTLDIHKRMQPLHIQIKSPQESTGDPGNSSSVSEGKGSSERGSPIEKYMRPAKHPNYSPPGSPIEKYQYPLFGLPFVHNDFQSEADWLRFWSKYKLSVPGNPHYLSHVPGLPNPCQNYVPYPTFNLPPHFSAVGSDNDIPLDLAIKHSRPGPTANGASKEKTKAPPNVKNEGPLNVVKTEKVDRSTQDELSTKCVHCGIVFLDEVMYALHMSCHGDSGPFQCSICQHLCTDKYDFTTHIQRGLHRNNAQVEKNGKPKE

SEQ ID NO: 15804 - protein, 1073 aa, Homo Sapiens
MHQPPESTAAAAAAADISARKMAHPAMFPRRGSGSGSASALNAAGTGVGSNATSSEDFPPPSLLQPPPPAASSTSGPQPPPPQSLNLLSQAQLQAQPLAPGGTQMKKKSGFQITSVTPAQISASISSNNSIAEDTESYDDLDESHTEDLSSSEILDVSLSRATDLGEPERSSSEETLNNFQEAETPGAVSPNQPHLPQPHLPHLPQQNVVINGNAHPHHLHHHHQIHHGHHLQHGHHHPSHVAVASASITGGPPSSPVSRKLSTTGSSDSITPVAPTSAVSSSGSPASVMTNMRAPSTTGGIGINSVTGTSTVNNVNITAVGSFNPNVTSSMLGNVNISTSNIPSAAGVSVGPGVTSGVNVNILSGMGNGTISSSAAVSSVPNAAAGMTGGSVSSQQQQPTVNTSRFRVVKLDSSSEPFKKGRWTCTEFYEKENAVPATEGVLINKVVETVKQNPIEVTSERESTSGSSVSSSVSTLSHYTESVGSGEMGAPTVVVQQQQQQQQQQQQQPALQGVTLQQMDFGSTGPQSIPAVSIPQSISQSQISQVQLQSQELSYQQKQGLQPVPLQATMSAATGIQPSPVNVVGVTSALGQQPSISSLAQPQLPYSQAAPPVQTPLPGAPPPQQLQYGQQQPMVSTQMAPGHVKSVTQNPASEYVQQQPILQTAMSSGQPSSAGVGAGTTVIPVAQPQGIQLPVQPTAVPAQPAGASVQPVGQAPAAVSAVPTGSQIANIGQQANIPTAVQQPSTQVPPSVIQQGAPPSSQVVPPAQTGIIHQGVQTSAPSLPQQLVIASQSSLLTVPPQPQGVEPVAQGIVSQQLPAVSSLPSASSISVTSQVSSTGPSGMPSAPTNLVPPQNIAQTPATQNGNLVQSVSQPPLIATNTNLPLAQQIPLSSTQFSAQSLAQAIGSQIEDARRAAEPSLVGLPQTISGDSGGMSAVSDGSSSSLAASASLFPLKVLPLTTPLVDGEDESSSGASVVAIDNKIEQAMDLVKSHLMYAVREEVEVLKEQIKELIEKNSQLEQENNLLKTLASPEQLAQFQAQLQTGSPPATTQPQGTTQPPAQPASQGSGPTA

SEQ ID NO: 15805 - protein, 780 aa, Homo Sapiens
MSKMPAKKKSCFQITSVTTAQVATSITEDTESLDDPDESRTEDVSSEIFDVSRATDYGPEEVCERSSSEETLNNVGDAETPGTVSPNLLLDGQLAAAAAAPANGGGVVSARSVSGALASTLAAAATSAPAPGAPGGPQLAGSSAGPVTAAPSQPPTTCSSRFRVIKLDHGSGEPYRRGRWTCMEYYERDSDSSVLTRSGDCIRHSSTFDQTAERDSGLGATGGSVVVVVASMQGAHGPESGTDSSLTAVSQLPPSEKMSQPTPAQPQSFSVGQPQPPPPPVGGAVAQSSAPLPPFPGAATGPQPMMAAAQPSQPQGAGPGGQTLPPTNVTLAQPAMSLPPQPGPAVGAPAAQQPQQFAYPQPQIPPGHLLPVQPSGQSEYLQQHVAGLQPPSPAQPSSTGAAASPATAATLPVGTGQNASSVGAQLMGASSQPSEAMAPRTGPAQGGQVAPCQPTGVPPATVGGVVQPCLGPAGAGQPQSVPPPQMGGSGPLSAVPGGPHAVVPGVPNVPAAVPAPSVPSVSTTSVTMPNVPAPLAQSQQLSSHTPVSRSSSIIQHVGLPLAPGTHSAPTSLPQSDLSQFQTQTQPLVGQVDDTRRKSEPLPQPPLSLIAENKPVVKPPVADSLANPLQLTPMNSLATSVFSIAIPVDGDEDRNPSTAFYQAFHLNTLKESKSLWDSASGGGVVAIDNKIEQAMDLVKSHLMYAVREEVEVLKEQIKELVERNSLLERENALLKSLSSNDQLSQLPTQQANPGSTSQQQAVIAQPPQPTQPPQQPNVSSA

SEQ ID NO: 15806 - protein, 134 aa, Homo Sapiens
MNTEMYQTPMEVAVYQLHNFSISFFSSLLGGDVVSVKLDNSASGASVVAIDNKIEQAMDLVKNHLMYAVREEVEILKEQIRELVEKNSQLERENTLLKTLASPEQLEKFQSCLSPEEPAPESPQVPEAPGGSAV

SEQ ID NO: 15807 - protein, 395 aa, Homo Sapiens; identical to SEQ ID NO: 13764

SEQ ID NO: 15808 - protein, 1077 aa, Homo Sapiens
MPRRKQQAPRRSAAYVPEEELKAAEIDEEHVEDDGLSLDIQESEYMCNEETEIKEAQSYQNSPVSSATNQDAGYGSPFSESSDQLAHFKGSSSREEKEDPQCPDSVSYPQDSLAQIKAVYANLFSESCWSSLALDLKKSGSTTSTNDASQKESSAPTPTPPTCPVSTTGPTTSTPSTSCSSSTSHSSTTSTSSSSGYDWHQAALAKTLQQTSSYGLLPEPSLFSTVQLYRQNNKLYGSVFTGASKFRCKDCSAAYDTLVELTVHMNETGHYRDDNRDKDSEKTKRWSKPRKRSLMEMEGKEDAQKVLKCMYCGHSFESLQDLSVHMIKTKHYQKVPLKEPVPAITKLVPSTKKRALQDLAPPCSPEPAGMAAEVALSESAKDQKAANPYVTPNNRYGYQNGASYTWQFEARKAQILKCMECGSSHDTLQQLTAHMMVTGHFLKVTTSASKKGKQLVLDPVVEEKIQSIPLPPTTHTRLPASSIKKQPDSPAGSTTSEEKKEPEKEKPPVAGDAEKIKEESEDSLEKFEPSTLYPYLREEDLDDSPKGGLDILKSLENTVSTAISKAQNGAPSWGGYPSIHAAYQLPGTVKPLPAAVQSVQVQPSYAGGVKSLSSAEHNALLHSPGSLTPPPHKSNVSAMEELVEKVTGKVNIKKEERPPEKEKSSLAKAASPIAKENKDFPKTEEVSGKPQKKGPEAETGKAKKEGPLDVHTPNGTEPLKAKVTNGCNNLGIIMDHSPEPSFINPLSALQSIMNTHLGKVSKPVSPSLDPLAMLYKISNSMLDKPVYPATPVKQADAIDRYYYENSDQPIDLTKSKNKPLVSSVADSVASPLRESALMDISDMVKNLTGRLTPKSSTPSTVSEKSDADGSSFEEALDELSPVHKRKGRQSNWNPQHLLILQAQFASSLRETTEGKYIMSDLGPQERVHISKFTGLSMTTISHWLANVKYQLRRTGGTKFLKNLDTGHPVFFCNDCASQFRTASTYISHLETHLGFSLKDLSKLPLNQIQEQQNVSKVLTNKTLGPLGATEEDLGSTFQCKLCNRTFASKHAVKLHLSKTHGKSPEDHLIYVTELEKQ

SEQ ID NO: 15809 - protein, 1034 aa, Homo Sapiens
MPRRKQQAPKRAAGYAQEEQLKEEEEIKEEEEEEDSGSVAQLQGGNDTGTDEELETGPEQKGCFSYQNSPGSHLSNQDAENESLLSDASDQVSDIKSVCGRDASDKKAHTHVRLPNEAHNCMDKMTAVYANILSDSYWSGLGLGFKLSNSERRNCDTRNGSNKSDFDWHQDALSKSLQQNLPSRSVSKPSLFSSVQLYRQSSKMCGTVFTGASRFRCRQCSAAYDTLVELTVHMNETGHYQDDNRKKDKLRPTSYSKPRKRAFQDMDKEDAQKVLKCMFCGDSFDSLQDLSVHMIKTKHYQKVPLKEPVPTISSKMVTPAKKRVFDVNRPCSPDSTTGSFADSFSSQKNANLQLSSNNRYGYQNGASYTWQFEACKSQILKCMECGSSHDTLQQLTTHMMVTGHFLKVTSSASKKGKQLVLDPLAVEKMQSLSEAPNSDSLAPKPSSNSASDCTASTTELKKESKKERPEETSKDEKVVKSEDYEDPLQKPLDPTIKYQYLREEDLEDGSKGGGDILKSLENTVTTAINKAQNGAPSWSAYPSIHAAYQLSEGTKPPLPMGSQVLQIRPNLTNKLRPIAPKWKVMPLVSMPTHLAPYTQVKKESEDKDEAVKECGKESPHEEASSFSHSEGDSFRKSETPPEAKKTELGPLKEEEKLMKEGSEKEKPQPLEPTSALSNGCALANHAPALPCINPLSALQSVLNNHLGKATEPLRSPSCSSPSSSTISMFHKSNLNVMDKPVLSPASTRSASVSRRYLFENSDQPIDLTKSKSKKAESSQAQSCMSPPQKHALSDIADMVKVLPKATTPKPASSSRVPPMKLEMDVRRFEDVSSEVSTLHKRKGRQSNWNPQHLLILQAQFASSLFQTSEGKYLLSDLGPQERMQISKFTGLSMTTISHWLANVKYQLRKTGGTKFLKNMDKGHPIFYCSDCASQFRTPSTYISHLESHLGFQMKDMTRLSVDQQSKVEQEISRVSSAQRSPETIAAEEDTDSKFKCKLCCRTFVSKHAVKLHLSKTHSKSPEHHSQFVTDVDEE

SEQ ID NO: 15810 - protein, 1081 aa, Homo Sapiens
MPRRKQQAPRRAAAYVSEELKAAALVDEGLDPEEHTADGEPSAKYMCPEKELARACPSYQNSPAAEFSCHEMDSESHISETSDRMADFESGSIKNEEETKEVTVPLEDTTVSDSLEQMKAVYNNFLSNSYWSNLNLNLHQPSSEKNNGSSSSSSSSSSSCGSGSFDWHQSAMAKTLQQVSQSRMLPEPSLFSTVQLYRQSSKLYGSIFTGASKFRCKDCSAAYDTLVELTVHMNETGHYRDDNHETDNNNPKRWSKPRKRSLLEMEGKEDAQKVLKCMYCGHSFESLQDLSVHMIKTKHYQKVPLKEPVTPVAAKIIPATRKKASLELELPSSPDSTGGTPKATISDTNDALQKNSNPYITPNNRYGHQNGASYAWHFEARKSQILKCMECGSSHDTLQELTAHMMVTGHFIKVTNSAMKKGKPIVETPVTPTITTLLDEKVQSVPLAATTFTSPSNTPASISPKLNVEVKKEVDKEKAVTDEKPKQKDKPGEEEEKCDISSKYHYLTENDLEESPKGGLDILKSLENTVTSAINKAQNGTPSWGGYPSIHAAYQLPNMMKLSLGSSGKSTPLKPMFGNSEIVSPTKNQTLVSPPSSQTSPMPKTNFHAMEELVKKVTEKVAKVEEKMKEPDGKLSPPKRATPSPCSSEVGEPIKMEASSDGGFRSQENSPSPPRDGCKDGSPLAEPVENGKELVKPLASSLSGSTAIITDHPPEQPFVNPLSALQSVMNIHLGKAAKPSLPALDPMSMLFKMSNSLAEKAAVATPPPLQSKKADHLDRYFYHVNNDQPIDLTKGKSDKGCSLGSVLLSPTSTAPATSSSTVTTAKTSAVVSFMSNSPLRENALSDISDMLKNLTESHTSKSSTPSSISEKSDIDGATLEEAEESTPAQKRKGRQSNWNPQHLLILQAQFAASLRQTSEGKYIMSDLSPQERMHISRFTGLSMTTISHWLANVKYQLRRTGGTKFLKNLDTGHPVFFCNDCASQIRTPSTYISHLESHLGFRLRDLSKLSTEQINSQIAQTKSPSEKMVTSSPEEDLGTSYQCKLCNRTFASKHAVKLHLSKTHGKSPEDHLLYVSELEKQ

SEQ ID NO: 15811 - protein, 371 aa, Homo Sapiens; identical to SEQ ID NO: 15392

SEQ ID NO: 15812 - protein, 905 aa, Homo Sapiens
MEGESSRFEIHTPVSDKKKKKCSIHKERPQKHSHEIFRDSSLVNEQSQITRRKKRKKDFQHLISSPLKKSRICDETANATSTLKKRKKRRYSALEVDEEAGVTVVLVDKENINNTPKHFRKDVDVVCVDMSIEQKLPRKPKTDKFQVLAKSHAHKSEALHSKVREKKNKKHQRKAASWESQRARDTLPQSESHQEESWLSVGPGGEITELPASAHKNKSKKKKKKSSNREYETLAMPEGSQAGREAGTDMQESQPTVGLDDETPQLLGPTHKKKSKKKKKKKSNHQEFEALAMPEGSQVGSEVGADMQESRPAVGLHGETAGIPAPAYKNKSKKKKKKSNHQEFEAVAMPESLESAYPEGSQVGSEVGTVEGSTALKGFKESNSTKKKSKKRKLTSVKRARVSGDDFSVPSKNSESTLFDSVEGDGAMMEEGVKSRPRQKKTQACLASKHVQEAPRLEPANEEHNVETAEDSEIRYLSADSGDADDSDADLGSAVKQLQEFIPNIKDRATSTIKRMYRDDLERFKEFKAQGVAIKFGKFSVKENKQLEKNVEDFLALTGIESADKLLYTDRYPEEKSVITNLKRRYSFRLHIGRNIARPWKLIYYRAKKMFDVNNYKGRYSEGDTEKLKMYHSLLGNDWKTIGEMVARSSLSVALKFSQISSQRNRGAWSKSETRKLIKAVEEVILKKMSPQELKEVDSKLQENPESCLSIVREKLYKGISWVEVEAKVQTRNWMQCKSKWTEILTKRMTNGRRIYYGMNALRAKVSLIERLYEINVEDTNEIDWEDLASAIGDVPPSYVQTKFSRLKAVYVPFWQKKTFPEIIDYLYETTLPLLKEKLEKMMEKKGTKIQTPAAPKQVFPFRDIFYYEDDSEGEDIEKESEGQAPCMAHACNSSTLGGQGRWII

SEQ ID NO: 15813 - protein, 373 aa, Homo Sapiens; identical to SEQ ID NO: 14989

SEQ ID NO: 15814 - protein, 1162 aa, Homo Sapiens
MEEVRCPEHGTFCFLKTGVRDGPNKGKSFYVCRADTCSFVRATDIPVSHCLLHEDFVVELQGLLLPQDKKEYRLFFRCIRSKAEGKRWCGSIPWQDPDSKEHSVSNKSQHASETFHHSSNWLRNPFKVLDKNQEPALWKQLIKGEGEEKKADKKQREKGDQLFDQKKEQKPEMMEKDLSSGLVPKKKQSVVQEKKQEEGAEIQCEAETGGTHKRDFSEIKSQQCQGNELTRPSASSQEKSSGKSQDVQRESEPLREKVTQLLPQNVHSHNSISKPQKGGPLNKEYTNWEAKETKAKDGPSIQATQKSLPQGHFQERPETHSVPAPGGPAAQAAPAAPGLSLGEGREAATSSDDEEEDDVVFVSSKPGSPLLFDSTLDLETKENLQFPDRSVQRKVSPASGVSKKVEPSDPVARRVYLTTQLKQKKSTLASVNIQALPDKGQKLIKQIQELEEVLSGLTLSPEQGTNEKSNSQVPQQSHFTKTTTGPPHLVPPQPLPRRGTQPVGSLELKSACQVTAGGSSQCYRGHTNQDHVHAVWKITSEAIGQLHRSLESCPGETVVAEDPAGLKVPLLLHQKQALAWLLWRESQKPQGGILADDMGLGKTLTMIALILTQKNQEKKEEKEKSTALTWLSKDDSCDFTSHGTLIICPASLIHHWKNEVEKRVNSNKLRVYLYHGPNRDSRARVLSTYDIVITTYSLVAKEIPTNKQEAEIPGANLNVEGTSTPLLRIAWARIILDEAHNVKNPRVQTSIAVCKLQACARWAVTGTPIQNNLLDMYSLLKFLRCSPFDEFNLWRSQVDNGSKKGGERLSILTKSLLLRRTKDQLDSTGRPLVILPQRKFQLHHLKLSEDEETVYNVFFARSRSALQSYLKRHESRGNQSGRSPNNPFSRVALEFGSEEPRHSEAADSPRSSTVHILSQLLRLRQCCCHLSLLKSALDPMELKGEGLVLSLEEQLSALTLSELRDSEPSSTVSLNGTFFKMELFEGMRESTKISSLLAELEAIQRNSASQKSVIVSQWTNMLKVVALHLKKHGLTYATIDGSVNPKQRMDLVEAFNHSRGPQVMLISLLAGGVGLNLTGGNHLFLLDMHWNPSLEDQACDRIYRVGQQKDVVIHRFVCEGTVEEKILQLQEKKKDLAKQVLSGSGESVTKLTLADLRVLFGI

SEQ ID NO: 15815 - protein, 506 aa, Homo Sapiens
MTSKPHSDWIPYSVLDDEGRNLRQQKLDRQRALLEQKQKKKRQEPLMVQANADGRPRSRRARQSEEQAPLVESYLSSSGSTSYQVQEADSLASVQLGATRPTAPASAKRTKAAATAGGQGGAARKEKKGKHKGTSGPAALAEDKSEAQGPVQILTVGQSDHAQDAGETAAGGGERPSGQDLRATMQRKGISSSMSFDEDEEDEEENSSSSSQLNSNTRPSSATSRKSVREAASAPSPTAPEQPVDVEVQDLEEFALRPAPQGITIKCRITRDKKGMDRGMYPTYFLHLDREDGKKVFLLAGRKRKKSKTSNYLISVDPTDLSRGGDSYIGKLRSNLMGTKFTVYDNGVNPQKASSSTLESGTLRQELAAVCYETNVLGFKGPRKMSVIVPGMNMVHERVSIRPRNEHETLLARWQNKNTESIIELQNKTPVWNDDTQSYVLNFHGRVTQASVKNFQIIHGNDPDYIVMQFGRVAEDVFTMDYNYPLCALQAFAIALSSFDSKLACE

SEQ ID NO: 15816 - protein, 202 aa, Homo Sapiens
MMQDVSSSPVSPADDSLSNSEEEPDRQQPPSGKRGGRKRRSSRRSAGGGAGPGGAAGGGVGGGDEPGSPAQGKRGKKSAGCGGGGGAGGGGGSSSGGGSPQSYEELQTQRVMANVRERQRTQSLNEAFAALRKIIPTLPSDKLSKIQTLKLAARYIDFLYQVLQSDELDSKMASCSYVAHERLSYAFSVWRMEGAWSMSASH

SEQ ID NO: 15817 - protein, 160 aa, Homo Sapiens
MEEGSSSPVSPVDSLGTSEEELERQPKRFGRKRRYSKKSSEDGSPTPGKRGKKGSPSAQSFEELQSQRILANVRERQRTQSLNEAFAALRKIIPTLPSDKLSKIQTLKLAARYIDFLYQVLQSDEMDNKMTSCSYVAHERLSYAFSVWRMEGAWSMSASH

SEQ ID NO: 15818 - protein, 540 aa, Homo Sapiens
MAWVLKMDEVIESGLVHDFDASLSGIGQELGAGAYSMSDVLALPIFKQEDSSLPLDGETEHPPFQYVMCAATSPAVKLHDETLTYLNQGQSYEIRMLDNRKMGDMPEINGKLVKSIIRVVFHDRRLQYTEHQQLEGWKWNRPGDRLLDLDIPMSVGIIDTRTNPSQLNAVEFLWDPAKRTSAFIQVHCISTEFTPRKHGGEKGVPFRIQVDTFKQNENGEYTDHLHSASCQIKVFKPKGADRKQKTDREKMEKRTAHEKEKYQPSYDTTILTEMRLEPIIEDAVEHEQKKSSKRTLPADYGDSLAKRGSCSPWPDAPTAYVNNSPSPAPTFTSPQQSTCSVPDSNSSSPNHQGDGASQTSGEQIQPSATIQETQQWLLKNRFSSYTRLFSNFSGADLLKLTKEDLVQICGAADGIRLYNSLKSRSVRPRLTIYVCREQPSSTVLQGQQQAASSASENGSGAPYVYHAIYLEEMIASEVARKLALVFNIPLHQINQVYRQGPTGIHILVSDQMVQNFQDESCFLFSTVKAESSDGIHIILK

SEQ ID NO: 15819 - protein, 764 aa, Homo Sapiens
MNGEADCPTDLEMAAPKGQDRWSQEDMLTLLECMKNNLPSNDSSKFKTTESHMDWEKVAFKDFSGDMCKLKWVEISNEVRKFRTLTELILDAQEHVKNPYKGKKLKKHPDFPKKPLTPYFRFFMEKRAKYAKLHPEMSNLDLTKILSKKYKELPEKKKMKYIQDFQREKQEFERNLARFREDHPDLIQNAKKSDIPEKPKTPQQLWYTHEKKVYLKVRPDATTKEVKDSLGKQWSQLSDKKRLKWIHKALEQRKEYEEIMRDYIQKHPELNISEEGITKSTLTKAERQLKDKFDGRPTKPPPNSYSLYCAELMANMKDVPSTERMVLCSQQWKLLSQKEKDAYHKKCDQKKKDYEVELLRFLESLPEEEQQRVLGEEKMLNINKKQATSPASKKPAQEGGKGGSEKPKRPVSAMFIFSEEKRRQLQEERPELSESELTRLLARMWNDLSEKKKAKYKAREAALKAQSERKPGGEREERGKLPESPKRAEEIWQQSVIGDYLARFKNDRVKALKAMEMTWNNMEKKEKLMWIKKAAEDQKRYERELSEMRAPPAATNSSKKMKFQGEPKKPPMNGYQKFSQELLSNGELNHLPLKERMVEIGSRWQRISQSQKEHYKKLAEEQQKQYKVHLDLWVKSLSPQDRAAYKEYISNKRKSMTKLRGPNPKSSRTTLQSKSESEEDDEEDEDDEDEDEEEEDDENGDSSEDGGDSSESSSEDESEDGDENEEDDEDEDDDEDDDEDEDNESEGSSSSSSSSGDSSDSDSN

SEQ ID NO: 15820 - protein, 393 aa, Homo Sapiens
MALPRSQGHWSNKDILRLLECMENNRPSDDNSTFSSTQSHMDWGKVAFKNFSGEMCRLKWLEISCNLRKFGTLKELVLEAKKCVKKMNKSQKYRNGPDFPKRPLTAYNRFFKESWPQYSQMYPGMRSQELTKILSKKYRELPEQMKQKYIQDFRKEKQEFEEKLARFREEHPDLVQKAKKSSVSKRTQNKVQKKFQKNIEEVRSLPKTDRFFKKVKFHGEPQKPPMNGYHKFHQDSWSSKEMQHLSVRERMVEIGRRWQRIPQSQKDHFKSQAEELQKQYKVKLDLWLKTLSPENYAAYKESTYAKGKNMAMTGGPDPRLKQADPQSSSAKGLQEGFGEGQGLQAAGTDSSQTIWVNCHVSMEPEENRKKDREKEESSNSSDCSSGEEIEVDV

SEQ ID NO: 15821 - protein, 400 aa, Homo Sapiens
MPAKDIKVALPRSQGHWSNADILRLLECMENNLPYDDNGTFSSTQSHMDWGKVAFKNFSGEMCRLKWLEISCSLRKFSTLKKLVLEAKKCVKNTNKSQKGRNHPDFPKRLLTAYIRFFKENWPQYSQMYPGMRSQEVTKILSKKYKELPEQMKQKHIQDFRKEKQEFEEKLARFREEHPDLDQKGKKSDICKRVQTKVQKKVQKNIEEVRSLPKTDQFFKKVKFHGEPQKPPMNGYQKFHQDSWSSKELQHLSLRERMVEIGRRWQRIPQSQKDHYKSQAELLQKEYKVELDLWLKTLSPEDYAAYKESTYAKGKNMAMMGGPAPSLKQTDPQSSSAKGLQEGFGEGQGLQAAGTEASQTIWVNCQVSMEPEDNRKKDGEEEESSNSLDCSSGEDMEVDV

SEQ ID NO: 15822 - protein, 531 aa, Homo Sapiens
MMDGRLLEHPHAQFGGSLGGVVGFPYPLGHHHVYELAGHQLQSAAAAASVPFSIDGLLGGSCAAAASVVNPTPLLPAACGVGGDGQPFKLSDSGDPDKESPGCKRRRTRTNFTGWQLEELEKAFNESHYPDVFMREALALRLDLVESRVQVWFQNRRAKWRKKENTKKGPGRPAHNSHPTTCSGEPMDPEEIARKELEKMEKKKRKHEKKLLKSQGRHLHSPGGLSLHSAPSSDSDSGGGGLSPEPPEPPPPAAKGPGAHASGAAGTAPAPPGEPPAPGTCDPAFYPSQRSGAGPQPRPGRPADKDAASCGPGAAVAAVERGAAGLPKASPFSVESLLSDSPPRRKAASNAAAAAAAGLDFAPGLPCAPRTLIGKGHFLLYPITQPLGFLVPQAALKGGAGLEPAPKDAPPAPAVPPAPPAQASFGAFSGPGGAPDSAFARRSPDAVASPGAPAPAPAPFRDLASAAATEGGGGDCADAGTAGPAPPPPAPSPRPGPRPPSPAEEPATCGVPEPGAAAGPSPPEGEELDMD

SEQ ID NO: 15823 - protein, 810 aa, Homo Sapiens
MSKGPGPGGSAASSAPPAATAQVLQAQPEKPQHYTYLKEFRTEQCPLFVQHKCTQHRPYTCFHWHFVNQRRRRSIRRRDGTFNYSPDVYCTKYDEATGLCPEGDECPFLHRTTGDTERRYHLRYYKTGICIHETDSKGNCTKNGLHCAFAHGPHDLRSPVYDIRELQAMEALQNGQTTVEGSIEGQSAGAASHAMIEKILSEEPRWQETAYVLGNYKTEPCKKPPRLCRQGYACPYYHNSKDRRRSPRKHKYRSSPCPNVKHGDEWGDPGKCENGDACQYCHTRTEQQFHPEIYKSTKCNDMQQSGSCPRGPFCAFAHVEQPPLSDDLQPSSAVSSPTQPGPVLYMPSAAGDSVPVSPSSPHAPDLSALLCRNSSLGSPSNLCGSPPGSIRKPPNLEGIVFPGESGLAPGSYKKAPGFEREDQVGAEYLKNFKCQAKLKPHSLEPRSQEQPLLQPKQDMLGILPAGSPLTSSISSSITSSLAATPPSPVGTSSVPGMNANALPFYPTSDTVESVIESALDDLDLNEFGVAALEKTFDNSTVPHPGSITIGGSLLQSSAPVNIPGSLGSSASFHSASPSPPVSLSSHFLQQPQGHLSQSENTFLGTSASHGSLGLNGMNSSIWEHFASGSFSPGTSPAFLSGPGAAELARLRQELDEANSTIKQWEESWKQAKQACDAWKKEAEEAGERASAAGAECELAREQRDALEVQVKKLQEELERLHAGPEPQALPAFSDLEALSLSTLYSLQKQLRAHLEQVDKAVFHMQSVKCLKCQEQKRAVLPCQHAALCELCAEGSECPICQPGRAHTLQS

SEQ ID NO: 15824 - protein, 680 aa, Homo Sapiens
MPSVSKAAAAALSGSPPQTEKPTHYRYLKEFRTEQCPLFSQHKCAQHRPFTCFHWHFLNQRRRRPLRRRDGTFNYSPDVYCSKYNEATGVCPDGDECPYLHRTTGDTERKYHLRYYKTGTCIHETDARGHCVKNGLHCAFAHGPLDLRPPVCDVRELQAQEALQNGQLGGGEGVPDLQPGVLASQAMIEKILSEDPRWQDANFVLGSYKTEQCPKPPRLCRQGYACPHYHNSRDRRRNPRRFQYRSTPCPSVKHGDEWGEPSRCDGGDGCQYCHSRTEQQFHPESTKCNDMRQTGYCPRGPFCAFAHVEKSLGMVNEWGCHDLHLTSPSSTGSGQPGNAKRRDSPAEGGPRGSEQDSKQNHLAVFAAVHPPAPSVSSSVASSLASSAGSGSSSPTALPAPPARALPLGPASSTVEAVLGSALDLHLSNVNIASLEKDLEEQDGHDLGAAGPRSLAGSAPVAIPGSLPRAPSLHSPSSASTSPLGSLSQPLPGPVGSSAMTPPQQPPPLRSEPGTLGSAASSYSPLGLNGVPGSIWDFVSGSFSPSPSPILSAGPPSSSSASPNGAELARVRRQLDEAKRKIRQWEESWQQVKQVCDAWQREAQEAKERARVADSDRQLALQKKEEVEAQVIFQLRAKQCVACRERAHGAVLRPCQHHILCEPCAATAPECPYCKGQPLQW

SEQ ID NO: 15825 - protein, 310 aa, Homo Sapiens
MKGQQKTAETEEGTVQIQEGAVATGEDPTSVAIASIQSAATFPDPNVKYVFRTENGGQVMYRVIQVSEGQLDGQTEGTGAISGYPATQSMTQAVIQGAFTSDDAVDTEGTAAETHYTYFPSTAVGDGAGGTTSGSTAAVVTTQGSEALLGQATPPGTGQFFVMMSPQEVLQGGSQRSIAPRTHPYSPKSEAPRTTRDEKRRAQHNEVERRRRDKINNWIVQLSKIIPDCSMESTKSGQSKGGILSKACDYIQELRQSNHRLSEELQGLDQLQLDNDVLRQQVEDLKNKNLLLRAQLRHHGLEVVIKNDSN

SEQ ID NO: 15826 - protein, 346 aa, Homo Sapiens
MDMLDPGLDPAASATAAAAASHDKGPEAEEGVELQEGGDGPGAEEQTAVAITSVQQAAFGDHNIQYQFRTETNGGQVTYRVVQVTDGQLDGQGDTAGAVSVVSTAAFAGGQQAVTQVGVDGAAQRPGPAAASVPPGPAAPFPLAVIQNPFSNGGSPAAEAVSGEARFAYFPASSVGDTTAVSVQTTDQSLQAGGQFYVMMTPQDVLQTGTQRTIAPRTHPYSPKIDGTRTPRDERRRAQHNEVERRRRDKINNWIVQLSKIIPDCNADNSKTGASKGGILSKACDYIRELRQTNQRMQETFKEAERLQMDNELLRQQIEELKNENALLRAQLQQHNLEMVGEGTRQ

SEQ ID NO: 15827 - protein, 2245 aa, Homo Sapiens
MPEMTENETPTKKQHRKKNRETHNAVERHRKKKINAGINRIGELIPCSPALKQSKNMILDQAFKYITELKRQNDELLLNGGNNEQAEEIKKLRKQLEEIQKENGRYIELLKANDICLYDDPTIHWKGNLKNSKVSVVIPSDQVQKKIIVYSNGNQPGGNSQGTAVQGITFNVSHNLQKQTANVVPVQRTCNLVTPVSISGVYPSENKPWHQTTVPALATNQPVPLCLPAAISAQSILELPTSESESNVLGATSGSLIAVSIESEPHQHHSLHTCLNDQNSSENKNGQENPKVLKKMTPCVTNIPHSSSATATKVHHGNKSCLSIQDFRGDFQNTFVVSVTTTVCSQPPRTAGDSSPMSISKSADLTSTATVVASSAPGVGKATIPISTLSGNPLDNGWTLSCSLPSSSVSTSDLKNINSLTRISSAGNTQTTWTTLQLAGNTIQPLSQTPSSAVTPVLNESGTSPTTSNHSRYVATDINLNNSFPADGQPVEQVVVTLPSCPSLPMQPLIAQPQVKSQPPKNILPLNSAMQVIQMAQPVGSAVNSAPTNQNVIILQPPSTTPCPTVMRAEVSNQTVGQQIVIIQAANQNPLPLLPAPPPGSVRLPINGANTVIGSNNSVQNVPTPQTFGGKHLVHILPRPSSLSASNSTQTFSVTMSNQQPQTISLNGQLFALQPVMSSSGTTNQTPMQIIQPTTSEDPNTNVALNTFGALASLNQSISQMAGQSCVQLSISQPANSQTAANSQTTTANCVSLTTTAAPPVTTDSSATLASTYNLVSTSSMNTVACLPNMKSKRLNKKPGGRKHLAANKSACPLNSVRDVSKLDCPNTEGSAEPPCNDGLLESFPAVLPSVSVSQANSVSVSASHSLGVLSSESLIPESVSKSKSAEKSSPPSQESVTSEHFAMAAAKSKDSTPNLQQETSQDKPPSSLALSDAAKPCASANVLIPSPSDPHILVSQVPGLSSTTSTTSTDCVSEVEIIAEPCRVEQDSSDTMQTTGLLKGQGLTTLLSDLAKKKNPQKSSLSDQMDHPDFSSENPKIVDSSVNLHPKQELLLMNNDDRDPPQHHSCLPDQEVINGSLINGRQADSPMSTSSGSSRSFSVASMLPETTREDVTSNATTNTCDSCTFVEQTDIVALAARAIFDQENLEKGRVGLQADIREVASKPSEASLLEGDPPFKSQIPKESGTGQAEATPNEFNSQGSIEATMERPLEKPSCSLGIKTSNASLQDSTSQPPSITSLSVNNLIHQSSISHPLASCAGLSPTSEQTTVPATVNLTVSSSSYGSQPPGPSLMTEYSQEQLNTMTSTIPNSQIQEPLLKPSHESRKDSAKRAVQDDLLLSSAKRQKHCQPAPLRLESMSLMSRTPDTISDQTQMMVSQIPPNSSNSVVPVSNPAHGDGLTRLFPPSNNFVTPALRQTEVQCGSQPSVAEQQQTQASQHLQALQQHVPAQGVSHLHSNHLYIKQQQQQQQQQQQQQQQQQAGQLRERHHLYQMQHHVPHAESSVHSQPHNVHQQRTLQQEVQMQKKRNLVQGTQTSQLSLQPKHHGTDQSRSKTGQPHPHHQQMQQQMQQHFGSSQTEKSCENPSTSRNHHNHPQNHLNQDIMHQQQDVGSRQQGSGVSSEHVSGHNPMQRLLTSRGLEQQMVSQPSIVTRSSDMTCTPHRPERNRVSSYSAEALIGKTSSNSEQRMGISIQGSRVSDQLEMRSYLDVPRNKSLAIHNMQGRVDHTVASDIRLSDCQTFKPSGASQQPQSNFEVQSSRNNEIGNPVSSLRSMQSQAFRISQNTGPPPIDRQKRLSYPPVQSIPTGNGIPSRDSENTCHQSFMQSLLAPHLSDQVIGSQRSLSEHQRNTQCGPSSAIEYNCPPTHENVHIRRESESQNRESCDMSLGAINTRNSTLNIPFSSSSSSGDIQGRNTSPNVSVQKSNPMRITESHATKGHMNPPVTTNMHGVARPALPHPSVSHGNGDQGPAVRQANSSVPQRSRHPLQDSSGSKIRQPERNRSGNQRQSTVFDPSLPHLPLSTGGSMILGRQQPATEKRGSIVRFMPDSPQVPNDNSGPDQHTLSQNFGFSFIPEGGMNPPINANASFIPQVTQPSATRTPALIPVDPQNTLPSFYPPYSPAHPTLSNDISIPYFPNQMFSNPSTEKVNSGSLNNRFGSILSPPRPVGFAQPSFPLLPDMPPMHMTNSHLSNFNMTSLFPEIATVLPDGSAMSPLLTIANSSASDSSKQSSNRPAHNISHILGHDCSSAV

SEQ ID NO: 15828 - protein, 341 aa, Homo Sapiens
MLLRPRRPPPLAPPAPPSPASPDPEPRTPGDAPGTPPRRPASPSALGELGLPVSPGSAQRTPWSARETELLLGTLLQPAVWRALLLDRRQALPTYRRVSAALAQQQVRRTPAQCRRRYKFLKDKFREAHGQPPGPFDEQIRKLMGLLGDNGRKRPRRRSPGSGRPQRARRPVPNAHAPAPSEPDATPLPTARDRDADPTWTLRFSPSPPKSADASPAPGSPPAPAPTALATCIPEDRAPVRGPGSPPPPPAREDPDSPPGRPEDCAPPPAAPPSLNTALLQTLGHLGDIANILGPLRDQLLTLNQHVEQLRGAFDQTVSLAVGFILGSAAAERGVLRDPCQ

SEQ ID NO: 15829 - protein, 334 aa, Homo Sapiens
MFGKPDKMDVRCHSDAEAARVSKNAHKESRESKGAEGNLPAAFLKEPQGAFSASGAAEDCNKSKSNSAADPDYCRRILVRDAKGSIREIILPKGLDLDRPKRTRTSFTAEQLYRLEMEFQRCQYVVGRERTELARQLNLSETQVKVWFQNRRTKQKKDQGKDSELRSVVSETAATCSVLRLLEQGRLLSPPGLPALLPPCATGALGSALRGPSLPALGAGAAAGSAAAAAAAAPGPAGAASPHPPAVGGAPGPGPAGPGGLHAGAPAAGHSLFSLPVPSLLGSVASRLSSAPLTMAGSLAGNLQELSARYLSSSAFEPYSRTNNKEGAEKKALD

SEQ ID NO: 15830 - protein, 290 aa, Homo Sapiens
MGDGGAERDRGPARRAESGGGGGRCGDRSGAGDLRADGGGHSPTEVAGTSASSPAGSRESGADSDGQPGPGEADHCRRILVRDAKGTIREIVLPKGLDLDRPKRTRTSFTAEQLYRLEMEFQRCQYVVGRERTELARQLNLSETQVKVWFQNRRTKQKKDQSRDLEKRASSSASEAFATSNILRLLEQGRLLSVPRAPSLLALTPSLPGLPASHRGTSLGDPRNSSPRLNPLSSASASPPLPPPLPAVCFSSAPLLDLPAGYELGSSAFEPYSWLERKVGSASSCKKANT

SEQ ID NO: 15831 - protein, 427 aa, Homo Sapiens
MEAMAASTSLPDPGDFDRNVPRICGVCGDRATGFHFNAMTCEGCKGFFRRSMKRKALFTCPFNGDCRITKDNRRHCQACRLKRCVDIGMMKEFILTDEEVQRKREMILKRKEEEALKDSLRPKLSEEQQRIIAILLDAHHKTYDPTYSDFCQFRPPVRVNDGGGSHPSRPNSRHTPSFSGDSSSSCSDHCITSSDMMDSSSFSNLDLSEEDSDDPSVTLELSQLSMLPHLADLVSYSIQKVIGFAKMIPGFRDLTSEDQIVLLKSSAIEVIMLRSNESFTMDDMSWTCGNQDYKYRVSDVTKAGHSLELIEPLIKFQVGLKKLNLHEEEHVLLMAICIVSPDRPGVQDAALIEAIQDRLSNTLQTYIRCRHPPPGSHLLYAKMIQKLADLRSLNEEHSKQYRCLSFQPECSMKLTPLVLEVFGNEIS

SEQ ID NO: 15832 - protein, 258 aa, Homo Sapiens
MRLSSSPPRGPQQLSSFGSVDWLSQSSCSGPTHTPRPADFSLGSLPGPGQTSGAREPPQAVSIKEAAGSSNLPAPERTMAGLSKEPNTLRAPRVRTAFTMEQVRTLEGVFQHHQYLSPLERKRLAREMQLSEVQIKTWFQNRRMKHKRQMQDPQLHSPFSGSLHAPPAFYSTSSGLANGLQLLCPWAPLSGPQALMLPPGSFWGLCQVAQEALASAGASCCGQPLASHPPTPGRPSLGPALSTGPRGLCAMPQTGDAF

SEQ ID NO: 15833 - protein, 521 aa, Homo Sapiens
MEANWTAFLFQAHEASHHQQQAAQNSLLPLLSSAVEPPDQKPLLPIPITQKPQGAPETLKDAIGIKKEKPKTSFVCTYCSKAFRDSYHLRRHESCHTGIKLVSRPKKTPTTVVPLISTIAGDSSRTSLVSTIAGILSTVTTSSSGTNPSSSASTTAMPVTQSVKKPSKPVKKNHACEMCGKAFRDVYHLNRHKLSHSDEKPFECPICNQRFKRKDRMTYHVRSHEGGITKPYTCSVCGKGFSRPDHLSCHVKHVHSTERPFKCQTCTAAFATKDRLRTHMVRHEGKVSCNICGKLLSAAYITSHLKTHGQSQSINCNTCKQGISKTCMSEETSNQKQQQQQQQQQQQQQQQQQQHVTSWPGKQVETLRLWEEAVKARKKEAANLCQTSTAATTPVTLTTPFSITSSVSSGTMSNPVTVAAAMSMRSPVNVSSAVNITSPMNIGHPVTITSPLSMTSPLTLTTPVNLPTPVTAPVNIAHPVTITSPMNLPTPMTLAAPLNIAMRPVESMPFLPQALPTSPPW

SEQ ID NO: 15834 - protein, 365 aa, Homo Sapiens
MTGRDSLSDGRTSSRALVPGGSPRGSRPRGFAITDLLGLEAELPAPAGPGQGSGCEGPAVAPCPGPGLDGSSLARGALPLGLGLLCGFGTQPPAAARAPCLLLADVPFLPPRGPEPAAPLAPSRPPPALGRQKRSDSVSTSDEDSQSEDRNDLKASPTLGKRKKRRHRTVFTAHQLEELEKAFSEAHYPDVYAREMLAVKTELPEDRIQVWFQNRRAKWRKREKRWGGSSVMAEYGLYGAMVRHCIPLPDSVLNSAEGGLLGSCAPWLLGMHKKSMGMIRKPGSEDKLAGLWGSDHFKEGSSQSESGSQRGSDKVSPENGLEDVAIDLSSSARQETKKVHPGAGAQGGSNSTALEGPQPGKVGAT

SEQ ID NO: 15835 - protein, 361 aa, Homo Sapiens
MTGKAGEALSKPKSETVAKSTSGGAPARCTGFGIQEILGLNKEPPSSHPRAALDGLAPGHLLAARSVLSPAGVGGMGLLGPGGLPGFYTQPTFLEVLSDPQSVHLQPLGRASGPLDTSQTASSDSEDVSSSDRKMSKSALNQTKKRKKRRHRTIFTSYQLEELEKAFNEAHYPDVYAREMLAMKTELPEDRIQVWFQNRRAKWRKREKCWGRSSVMAEYGLYGAMVRHSIPLPESILKSAKDGIMDSCAPWLLGMHKKSLEAAAESGRKPEGERQALPKLDKMEQDERGPDAQAAISQEELRENSIAVLRAKAQEHSTKVLGTVSGPDSLARSTEKPEEEEAMDEDRPAERLSPPQLEDMA

SEQ ID NO: 15836 - protein, 1129 aa, Homo Sapiens
MPATRKPMRYGHTEGHTEVCFDDSGSFIVTCGSDGDVRIWEDLDDDDPKFINVGEKAYSCALKSGKLVTAVSNNTIQVHTFPEGVPDGILTRFTTNANHVVFNGDGTKIAAGSSDFLVKIVDVMDSSQQKTFRGHDAPVLSLSFDPKDIFLASASCDGSVRVWQISDQTCAISWPLLQKCNDVINAKSICRLAWQPKSGKLLAIPVEKSVKLYRRESWSHQFDLSDNFISQTLNIVTWSPCGQYLAAGSINGLIIVWNVETKDCMERVKHEKGYAICGLAWHPTCGRISYTDAEGNLGLLENVCDPSGKTSSSKVSSRVEKDYNDLFDGDDMSNAGDFLNDNAVEIPSFSKGIINDDEDDEDLMMASGRPRQRSHILEDDENSVDISMLKTGSSLLKEEEEDGQEGSIHNLPLVTSQRPFYDGPMPTPRQKPFQSGSTPLHLTHRFMVWNSIGIIRCYNDEQDNAIDVEFHDTSIHHATHLSNTLNYTIADLSHEAILLACESTDELASKLHCLHFSSWDSSKEWIIDLPQNEDIEAICLGQGWAAAATSALLLRLFTIGGVQKEVFSLAGPVVSMAGHGEQLFIVYHRGTGFDGDQCLGVQLLELGKKKKQILHGDPLPLTRKSYLAWIGFSAEGTPCYVDSEGIVRMLNRGLGNTWTPICNTREHCKGKSDHYWVVGIHENPQQLRCIPCKGSRFPPTLPRPAVAILSFKLPYCQIATEKGQMEEQFWRSVIFHNHLDYLAKNGYEYEESTKNQATKEQQELLMKMLALSCKLEREFRCVELADLMTQNAVNLAIKYASRSRKLILAQKLSELAVEKAAELTATQVEEEEEEEDFRKKLNAGYSNTATEWSQPRFRNQVEEDAEDSGEADDEEKPEIHKPGQNSFSKSTNSSDVSAKSGAVTFSSQGRVNPFKVSASSKEPAMSMNSARSTNILDNMGKSSKKSTALSRTTNNEKSPIIKPLIPKPKPKQASAASYFQKRNSQTNKTEEVKEENLKNVLSETPAICPPQNTENQRPKTGFQMWLEENRSNILSDNPDFSDEADIIKEGMIRFRVLSTEERKVWANKAKGETASEGTEAKKRKRVVDESDETENQEEKAKENLNLSKKQKPLDFSTNQKLSAFAFKQE

SEQ ID NO: 15837 - protein, 1365 aa, Homo Sapiens
MEFSIKQSPLSVQSVVKCIKMKQAPEILGSANGKTPSCEVNRECSVFLSKAQLSSSLQEGVMQKFNGHDALPFIPADKLKDLTSRVFNGEPGAHDAKLRFESQEMKGIGTPPNTTPIKNGSPEIKLKITKTYMNGKPLFESSICGDSAADVSQSEENGQKPENKARRNRKRSIKYDSLLEQGLVEAALVSKISSPSDKKIPAKKESCPNTGRDKDHLLKYNVGDLVWSKVSGYPWWPCMVSADPLLHSYTKLKGQKKSARQYHVQFFGDAPERAWIFEKSLVAFEGEGQFEKLCQESAKQAPTKAEKIKLLKPISGKLRAQWEMGIVQAEEAASMSVEERKAKFTFLYVGDQLHLNPQVAKEAGIAAESLGEMAESSGVSEEAAENPKSVREECIPMKRRRRAKLCSSAETLESHPDIGKSTPQKTAEADPRRGVGSPPGRKKTTVSMPRSRKGDAASQFLVFCQKHRDEVVAEHPDASGEEIEELLRSQWSLLSEKQRARYNTKFALVAPVQAEEDSGNVNGKKRNHTKRIQDPTEDAEAEDTPRKRLRTDKHSLRKRDTITDKTARTSSYKAMEAASSLKSQAATKNLSDACKPLKKRNRASTAASSALGFSKSSSPSASLTENEVSDSPGDEPSESPYESADETQTEVSVSSKKSERGVTAKKEYVCQLCEKPGSLLLCEGPCCGAFHLACLGLSRRPEGRFTCSECASGIHSCFVCKESKTDVKRCVVTQCGKFYHEACVKKYPLTVFESRGFRCPLHSCVSCHASNPSNPRPSKGKMMRCVRCPVAYHSGDACLAAGCSVIASNSIICTAHFTARKGKRHHAHVNVSWCFVCSKGGSLLCCESCPAAFHPDCLNIEMPDGSWFCNDCRAGKKLHFQDIIWVKLGNYRWWPAEVCHPKNVPPNIQKMKHEIGEFPVFFFGSKDYYWTHQARVFPYMEGDRGSRYQGVRGIGRVFKNALQEAEARFREIKLQREARETQESERKPPPYKHIKVNKPYGKVQIYTADISEIPKCNCKPTDENPCGFDSECLNRMLMFECHPQVCPAGEFCQNQCFTKRQYPETKIIKTDGKGWGLVAKRDIRKGEFVNEYVGELIDEEECMARIKHAHENDITHFYMLTIDKDRIIDAGPKGNYSRFMNHSCQPNCETLKWTVNGDTRVGLFAVCDIPAGTELTFNYNLDCLGNEKTVCRCGASNCSGFLGDRPKTSTTLSSEEKGKKTKKKTRRRRAKGEGKRQSEDECFRCGDGGQLVLCDRKFCTKAYHLSCLGLGKRPFGKWECPWHHCDVCGKPSTSFCHLCPNSFCKEHQDGTAFSCTPDGRSYCCEHDLGAASVRSTKTEKPPPEPGKPKGKRRRRRGWRRVTEGK

SEQ ID NO: 15838 - protein, 1651 aa, Homo Sapiens
MEGSLAGSLAAPDRPQGPERLPGPAPRENIEGGAEAAEGEGGIFRSTRYLPVTKEGPRDILDGRGGISGTPDGRGPWEHPLVQEAGEGILSERRFEDSVIVRTMKPHAELEGSRRFLHHRGEPRLLEKHAQGRPRFDWLQDEDEQGSPQDAGLHLDLPAQPPPLAPFRRVFVPVEDTPKTLDMAVVGGREDLEDLEGLAQPSEWGLPTSASEVATQTWTVNSEASVERLQPLLPPIRTGPYLCELLEEVAEGVASPDEDEDEEPAVFPCIECSIYFKQKEHLLEHMSQHRRAPGQEPPADLAPLACGECGWAFADPTALEQHRQLHQASREKIIEEIQKLKQVPGDEGREARLQCPKCVFGTNSSRAYVQHAKLHMREPPGQTTKEPFGGSSGAGSPSPEASALLYQPYGAAVGLSACVFCGFPAPSESLLREHVRLVHAHPHWEEDGEAYEEDPASQPGTSQDAHACFPDTAVDYFGKAEPSLAPMWRENPAGYDPSLAFGPGCQQLSIRDFPLSKPLLHGTGQRPLGRLAFPSTLASTPYSLQLGRNKSTVHPQGLGERRRPWSEEEEEEEEEEDVVLTSEMDFSPENGVFSPLATPSLIPQAALELKQAFREALQAVEATQGQQQQLRGMVPIVLVAKLGPQVMAAARVPPRLQPEELGLAGAHPLDFLLLDAPLGGPLGLDTLLDGDPAMALKHEERKCPYCPDRFHNGIGLANHVRGHLNRVGVSYNVRHFISAEEVKAIERRFSFQKKKKKVANFDPGTFSLMRCDFCGAGFDTRAGLSSHARAHLRDFGITNWELTVSPINILQELLATSAAEQPPSPLGREPGGPPGSFLTSRRPRLPLTVPFPPTWAEDPGPAYGDAQSLTTCEVCGACFETRKGLSSHARSHLRQLGVAESESSGAPIDLLYELVKQKGLPDAHLGLPPGLAKKSSSLKEVVAGAPRPGLLSLAKPLDAPAVNKAIKSPPGFSAKGLGHPPSSPLLKKTPLALAGSPTPKNPEDKSPQLSLSPRPASPKAQWPQSEDEGPLNLTSGPEPARDIRCEFCGEFFENRKGLSSHARSHLRQMGVTEWYVNGSPIDTLREILKRRTQSRPGGPPNPPGPSPKALAKMMGGAGPGSSLEARSPSDLHISPLAKKLPPPPGSPLGHSPTASPPPTARKMFPGLAAPSLPKKLKPEQIRVEIKREMLPGALHGELHPSEGPWGAPREDMTPLNLSSRAEPVRDIRCEFCGEFFENRKGLSSHARSHLRQMGVTEWSVNGSPIDTLREILKKKSKPCLIKKEPPAGDLAPALAEDGPPTVAPGPVQSPLPLSPLAGRPGKPGAGPAQVPRELSLTPITGAKPSATGYLGSVAAKRPLQEDRLLPAEVKAKTYIQTELPFKAKTLHEKTSHSSTEACCELCGLYFENRKALASHARAHLRQFGVTEWCVNGSPIETLSEWIKHRPQKVGAYRSYIQGGRPFTKKFRSAGHGRDSDKRPSLGLAPGGLAVVGRSAGGEPGPEAGRAADGGERPLAASPPGTVKAEEHQRQNINKFERRQARPPDASAARGGEDTNDLQQKLEEVRQPPPRVRPVPSLVPRPPQTSLVKFVGNIYTLKCRFCEVEFQGPLSIQEEWVRHLQRHILEMNFSKADPPPEESQAPQAQTAAAEAP

SEQ ID NO: 15839 - protein, 449 aa, Homo Sapiens
MGSDVRDLNALLPAVPSLGGGGGCALPVSGAAQWAPVLDFAPPGASAYGSLGGPAPPPAPPPPPPPPPHSFIKQEPSWGGAEPHEEQCLSAFTVHFSGQFTGTAGACRYGPFGPPPPSQASSGQARMFPNAPYLPSCLESQPAIRNQGYSTVTFDGTPSYGHTPSHHAAQFPNHSFKHEDPMGQQGSLGEQQYSVPPPVYGCHTPTDSCTGSQALLLRTPYSSDNLYQMTSQLECMTWNQMNLGATLKGVAAGSSSSVKWTEGQSNHSTGYESDNHTTPILCGAQYRIHTHGVFRGIQDVRRVPGVAPTLVRSASETSEKRPFMCAYPGCNKRYFKLSHLQMHSRKHTGEKPYQCDFKDCERRFSRSDQLKRHQRRHTGVKPFQCKTCQRKFSRSDHLKTHTRTHTGKTSEKPFSCRWPSCQKKFARSDELVRHHNMHQRNMTKLQLAL

SEQ ID NO: 15840 - protein, 261 aa, Homo Sapiens
MVVVAAAPNPADGTPKVLLLSGQPASAAGAPAGQALPLMVPAQRGASPEAASGGLPQARKRQRLTHLSPEEKALRRKLKNRVAAQTARDRKKARMSELEQQVVDLEEENQKLLLENQLLREKTHGLVVENQELRQRLGMDALVAEEEAEAKGNEVRPVAGSAESAALRLRAPLQQVQAQLSPLQNISPWILAVLTLQIQSLISCWAFWTTWTQSCSSNALPQSLPAWRSSQRSTQKDPVPYQPPFLCQWGRHQPSWKPLMN

SEQ ID NO: 15841 - protein, 324 aa, Homo Sapiens
MSSEAETQQPPAAPPAAPALSAADTKPGTTGSGAGSGGPGGLTSAAPAGGDKKVIATKVLGTVKWFNVRNGYGFINRNDTKEDVFVHQTAIKKNNPRKYLRSVGDGETVEFDVVEGEKGAEAANVTGPGGVPVQGSKYAADRNHYRRYPRRRGPPRNYQQNYQNSESGEKNEGSESAPEGQAQQRRPYRRRRFPPYYMRRPYGRRPQYSNPPVQGEVMEGADNQGAGEQGRPVRQNMYRGYRPRFRRGPPRQRQPREDGNEEDKENQGDETQGQQPPQRRYRRNFNYRRRRPENPKPQDGKETKAADPPAENSSAPEAEQGGAE

SEQ ID NO: 15842 - protein, 364 aa, Homo Sapiens
MSEVEAAAGATAVPAATVPATAAGVVAVVVPVPAGEPQKGGGAGGGGGAASGPAAGTPSAPGSRTPGNPATAVSGTPAPPARSQADKPVLAIQVLGTVKWFNVRNGYGFINRNDTKEDVFVHQTAIKRNNPRKFLRSVGDGETVEFDVVEGEKGAEATNVTGPGGVPVKGSRYAPNRRKSRRFIPRPPSVAPPPMVAEIPSAGTGPGSKGERAEDSGQRPRRWCPPPFFYRRRFVRGPRPPNQQQPIEGTDRVEPKETAPLEGHQQQGDERVPPPRFRPRYRRPFRPRPRQQPTTEGGDGETKPSQGPADGSRPEPQRPRNRPYFQRRRQQAPGPQQAPGPRQPAAPETSAPVNSGDPTTTILE

SEQ ID NO: 15843 - protein, 372 aa, Homo Sapiens
MSEAGEATTTTTTTLPQAPTEAAAAAPQDPAPKSPVGSGAPQAAAPAPAAHVAGNPGGDAAPAATGTAAAASLATAAGSEDAEKKVLATKVLGTVKWFNVRNGYGFINRNDTKEDVFVHQTAIKKNNPRKYLRSVGDGETVEFDVVEGEKGAEAANVTGPDGVPVEGSRYAADRRRYRRGYYGRRRGPPRNYAGEEEEEGSGSSEGFDPPATDRQFSGARNQLRRPQYRPQYRQRRFPPYHVGQTFDRRSRVLPHPNRIQAGEIGEMKDGVPEGAQLQGPVHRNPTYRPRYRSRGPPRPRPAPAVGEAEDKENQQATSGPNQPSVRRGYRRPYNYRRRPRPPNAPSQDGKEAKAGEAPTENPAPPTQQSSAE

SEQ ID NO: 15844 - protein, 1422 aa, Homo Sapiens
MSGIKRTIKETDPDYEDVSVALPNKRHKAIENSARDAAVQKIETIIKEQFALEMKNKEHEIEVIDQRLIEARRMMDKLRACIVANYYASAGLLKVSEGSKTCDTMVFNHPAIKKFLESPSRSSSPANQRAETPSANHSESDSLSQHNDFLSDKDNNSNMDIEERLSNNMEQRPSRNTGRDTSRITGSHKTEQRNADLTDETSRLFVKKTIVVGNVSKYIPPDKREENDQSTHKWMVYVRGSRREPSINHFVKKVWFFLHPSYKPNDLVEVREPPFHLTRRGWGEFPVRVQVHFKDSQNKRIDIIHNLKLDRTYTGLQTLGAETVVDVELHRHSLGEDCIYPQSSESDISDAPPSLPLTIPAPVKASSPIKQSHEPVPDTSVEKGFPASTEAERHTPFYALPSSLERTPTKMTTSQKVTFCSHGNSAFQPIASSCKIVPQSQVPNPESPGKSFQPITMSCKIVSGSPISTPSPSPLPRTPTSTPVHVKQGTAGSVINNPYVIMDKQPGQVIGATTPSTGSPTNKISTASQVSQGTGSPVPKIHGSSFVTSTVKQEDSLFASMPPLCPIGSHPKVQSPKPITGGLGAFTKVIIKQEPGEAPHVPATGAASQSPLPQYVTVKGGHMIAVSPQKQVITPGEGIAQSAKVQPSKVVGVPVGSALPSTVKQAVAISGGQILVAKASSSVSKAVGPKQVVTQGVAKAIVSGGGGTIVAQPVQTLTKAQVTAAGPQKSGSQGSVMATLQLPATNLANLANLPPGTKLYLTTNSKNPSGKGKLLLIPQGAILRATNNANLQSGSAASGGSGAGGGGGGGGGGGSGSGGGGSTGGGGGTAGGGTQSTAGPGGISQHLTYTSYILKQTPQGTFLVGQPSPQTSGKQLTTGSVVQGTLGVSTSSAQGQQTLKVISGQKTTLFTQAAHGGQASLMKISDSTLKTVPATSQLSKPGTTMLRVAGGVITTATSPAVALSANGPAQQSEGMAPVSSSTVSSVTKTSGQQQVCVSQATVGTCKAATPTVVSATSLVPTPNPISGKATVSGLLKIHSSQSSPQQAVLTIPSQLKPLSVNTSGGVQTILMPVNKVVQSFSTSKPPAILPVAAPTPVVPSSAPAAVAKVKTEPETPGPSCLSQEGQTAVKTEESSELGNYVIKIDHLETIQQLLTAVVKKIPLITAKSEDASCFSAKSVEQYYGWNIGKRRAAEWQRAMTMRKVLQEILEKNPRFHHLTPLKTKHIAHWCRCHGYTPPDPESLRNDGDSIEDVLTQIDSEPECPSSFSSADNLCRKLEDLQQFQKREPENEEEVDILSLSEPVKINIKKEQEEKQEEVKFYLPPTPGSEFIGDVTQKIGITLQPVALHRNVYASVVEDMILKATEQLVNDILRQALAVGYQTASHNRIPKEITVSNIHQAICNIPFLDFLTNKHMGILNEDQ

SEQ ID NO: 15845 - protein, 227 aa, Homo Sapiens
MFKRMAEFGPDSGGRVKGVTIVKPIVYGNVARYFGKKREEDGHTHQWTVYVKPYRNEDMSAYVKKIQFKLHESYGNPLRVVTKPPYEITETGWGEFEIIIKIFFIDPNERPVTLYHLLKLFQSDTNAMLGKKTVVSEFYDEMIFQDPTAMMQQLLTTSRQLTLGAYKHETEFAELEVKTREKLEAAKKKTSFEIAELKERLKASRETINCLKNEIRKLEEDDQAKDI

SEQ ID NO: 15846 - protein, 414 aa, Homo Sapiens
MASGDTLYIATDGSEMPAEIVELHEIEVETIPVETIETTVVGEEEEEDDDDEDGGGGDHGGGGGHGHAGHHHHHHHHHHHPPMIALQPLVTDDPTQVHHHQEVILVQTREEVVGGDDSDGLRAEDGFEDQILIPVPAPAGGDDDYIEQTLVTVAAAGKSGGGGSSSSGGGRVKKGGGKKSGKKSYLSGGAGAAGGGGADPGNKKWEQKQVQIKTLEGEFSVTMWSSDEKKDIDHETVVEEQIIGENSPPDYSEYMTGKKLPPGGIPGIDLSDPKQLAEFARMKPRKIKEDDAPRTIACPHKGCTKMFRDNSAMRKHLHTHGPRVHVCAECGKAFVESSKLKRHQLVHTGEKPFQCTFEGCGKRFSLDFNLRTHVRIHTGDRPYVCPFDGCNKKFAQSTNLKSHILTHAKAKNNQ

SEQ ID NO: 15847 - protein, 372 aa, Homo Sapiens
MASNEDFSITQDLEIPADIVELHDINVEPLPMEDIPTESVQYEDVDGNWIYGGHNHPPLMVLQPLFTNTGYGDHDQEMLMLQTQEEVVGYCDSDNQLGNDLEDQLALPDSIEDEHFQMTLASLSASAASTSTSTQSRSKKPSKKPSGKSATSTEANPAGSSSSLGTRKWEQKQMQVKTLEGEFSVTMWSPNDNNDQGAVGEGQAENPPDYSEYLKGKKLPPGGLPGIDLSDPKQLAEFTKVKPKRSKGEPPKTVPCSYSGCEKMFRDYAAMRKHLHIHGPRVHVCAECGKAFLESSKLRRHQLVHTGEKPFQCTFEGCGKRFSLDFNLRTHLRIHTGDKPFVCPFDVCNRKFAQSTNLKTHILTHVKTKNNP

SEQ ID NO: 15848 - protein, 694 aa, Homo Sapiens
MENKSLESSQTDLKLVAHPRAKSKVWKYFGFDTNAEGCILQWKKIYCRICMAQIAYSGNTSNLSYHLEKNHPEEFCEFVKSNTEQMREAFATAFSKLKPESSQQPGQDALAVKAGHGYDSKKQQELTAAVLGLICEGLYPASIVDEPTFKVLLKTADPRYELPSRKYISTKAIPEKYGAVREVILKELAEATWCGISTDMWRSENQNRAYVTLAAHFLGLGAPNCLSMGSRCLKTFEVPEENTAETITRVLYEVFIEWGISAKVFGATTNYGKDIVKACSLLDVAVHMPCLGHTFNAGIQQAFQLPKLGALLSRCRKLVEYFQQSAVAMYMLYEKQKQQNVAHCMLVSNRVSWWGSTLAMLQRLKEQQFVIAGVLVEDSNNHHLMLEASEWATIEGLVELLQPFKQVAEMLSASRYPTISMVKPLLHMLLNTTLNIKETDSKELSMAKEVIAKELSKTYQETPEIDMFLNVATFLDPRYKRLPFLSAFERQQVENRVVEEAKGLLDKVKDGGYRPAEDKIFPVPEEPPVKKLMRTSTPPPASVINNMLAEIFCQTGGVEDQEEWHAQVVEELSNFKSQKVLGLNEDPLKWWSDRLALFPLLPKVLQKYWCVTATRVAPERLFGSAANVVSAKRNRLAPAHVDEQVFLYENARSGAEAEPEDQDEGEWGLDQEQVFSLGDGVSGGFFGIRDSSFL

SEQ ID NO: 15849 - protein, 218 aa, Homo Sapiens
MMRREDEEEEGTMMKAKGDLEMKEEEEISETGELVGPFVSAMPTPMPHNKGTRFSEAWEYFHLAPARAGHHPNQYATCRLCGRQVSRGPGVNVGTTALWKHLKSMHREELEKSGHGQAGQRQDPRPHGPQLPTGIEGNWGRLLEQVGTMALWASQREKEVLRRERAVEWRERAVEKRERALEEVERAILEMKWKVRAEKEACQREKELPAAVHPFHFV

SEQ ID NO: 15850 - protein, 234 aa, Homo Sapiens
MRSGEPACTMDQARGLDDAAARGGQCPGLGPAPTPTPPGRLGAPYSEAWGYFHLAPGRPGHPSGHWATCRLCGEQVGRGPGFHAGTSALWRHLRSAHRRELESSGAGSSPPAAPCPPPPGPAAAPEGDWARLLEQMGALAVRGSRRERELERRELAVEQGERALERRRRALQEEERAAAQARRELQAEREALQARLRDVSRREGALGWAPAAPPPLKDDPEGDRDGCVITKVLL

SEQ ID NO: 15851 - protein, 1171 aa, Homo Sapiens
MENNLKTCPKEDGDFVSDKIKFKIEEEDDDGIPPDSLERMDFKSEQEDMKQTDSGGERAGLGGTGCSCKPPGKYLSAESEDDYGALFSQYSSTLYDVAMEAVTQSLLSSRNMSSRKKSPAWKHFFISPRDSTKAICMYCVKEFSRGKNEKDLSTSCLMRHVRRAHPTVLIQENGSVSAVSSFPSPSLLLPPQPADAGDLSTILSPIKLVQKVASKIPSPDRITEESVSVVSSEEISSDMSVSEKCGREEALVGSSPHLPALHYDEPAENLAEKSLPLPKSTSGSRRRSAVWKHFYLSPLDNSKAVCIHCMNEFSRGKNGKDLGTSCLIRHMWRAHRAIVLQENGGTGIPPLYSTPPTLLPSLLPPEGELSSVSSSPVKPVRESPSASSSPDRLTEDLQSHLNPGDGLMEDVAAFSSSDDIGEASASSPEKQQADGLSPRLFESGAIFQQNKKVMKRLKSEVWHHFSLAPMDSLKAECRYCGCAISRGKKGDVGTSCLMRHLYRRHPEVVGSQKGFLGASLANSPYATLASAESSSSKLTDLPTVVTKNNQVMFPVNSKKTSKLWNHFSICSADSTKVVCLHCGRTISRGKKPTNLGTSCLLRHLQRFHSNVLKTEVSETARPSSPDTRVPRGTELSGASSFDDTNEKFYDSHPVAKKITSLIAEMIALDLQPYSFVDNVGFNRLLEYLKPQYSLPAPSYFSRTAIPGMYDNVKQIIMSHLKEAESGVIHFTSGIWMSNQTREYLTLTAHWVSFESPARPRCDDHHCSALLDVSQVDCDYSGNSIQKQLECWWEAWVTSTGLQVGITVTDNASIGKTLNEGEHSSVQCFSHTVNLIVSEAIKSQRMVQNLLSLARKICERVHRSPKAKEKLAELQREYALPQHHLIQDVPSKWSTSFHMLERLIEQKRAINEMSVECNFRELISCDQWEVMQSVCRALKPFEAASREMSTQMSTLSQVIPMVHILNRKVEMLFEETMGIDTMLRSLKEAMVSRLSATLHDPRYVFATLLDPRYKASLFTEEEAEQYKQDLIRELELMNSTSEDVAASHRCDAGSPSKDSAAEENLWSLVAKVKKKDPREKLPEAMVLAYLEEEVLEHSCDPLTYWNLKKASWPGLSALAVRFLGCPPSIVPSEKLFNTPTENGSLGQSRLMMEHFEKLIFLKVNLPLIYFQY

SEQ ID NO: 15852 - protein, 693 aa, Homo Sapiens
MIAPLLCILSYNFNTFAILNVYSKLTMFCTTNSLPMDLLLKQGSLKQEVESFCYQIVSESNDQKVGILQSEDKQLQPSVSKKSEGELSRVKFISNSNKITFSKKPKRRKYDESYLSFGFTYFGNRDAPHAQCVLCKKILSNSSLAPSKLRRHLETKHAAYKDKDISFFKQHLDSPENNKPPTPKIVNTDNESATEASYNVSYHIALSGEAHTIGELLIKPCAKDVVMRMFDEQYSKKIDAVQLSNSTVARRIKDLAADIEEELVCRLKICDGFSLQLDESADVSGLAVLLVFVRYRFNKSIEEDLLLCESLQSNATGEEIFNCINSFMQKHEIEWEKCVDVCSDASRAVDGKIAEAVTLIKYVAPESTSSHCLLYRHALAVKIMPTSLKNVLDQAVQIINYIKARPHQSRLLKILCEEMGAQHTALLLNTEVRWLSRGKVLVRLFELRRELLVFMDSAFRLSDCLTNSSWLLRLAYLADIFTKLNEVNLSMQGKNVTVFTVFDKMSSLLRKLEFWASSVEEENFDCFPTLSDFLTEINSTVDKDICSAIVQHLRGLRATLLKYFPVTNDNNAWVRNPFTVTVKPASLVARDYESLIDLTSDSQVKQNFSELSLNDFWSSLIQEYPSIARRAVRVLLPFATMHLCETGFSYYAATKTKYRKRLDAAPHMRIRLSNITPNIKRICDKKTQKHCSH

SEQ ID NO: 15853 - protein, 979 aa, Homo Sapiens
MSVCTLSVPVSSLSPGRRCNTFSDSGILGCVPINSNTDEEDVVEEKMVAEGVNKEAKQPAKKKRKKGLRIKGKRRRKKLILAKKFSKDLGSGRPVADAPALLASNDPEQDEESLFESNIEKQIYLPSTRAKTSIVWHFFHVDPQYTWRAICNLCEKSVSRGKPGSHLGTSTLQRHLQARHSPHWTRANKFGVASGEEDFTLDVSLSPSSGSNGSFEYIPTDPLDDNRMGKKHDKSASDALRAERGRFLIKSNIVKHALIPGTRAKTSAVWNFFYTDPQHISRAVCNICKRSVSRGRPGSHLGTSTLQRHLQATHPIHWAVANKDSGAVANGLDEAETERSDLLSDTLHGEKSTGSQDLTAEDLSDSDSDEPMLEVENRSESPIPVAEQGTLMRAQERETTCCGNPVSSHISQAIIQMIVEDMHPYNYFSTPAFQRFMQIVAPDYRLPSETYFFTKAVPQLYDCVREKIFLTLENVQSQKIHLTVDIWTHDPSTDYFIVTVHWVSLETASFLNNGRIPDFRKWAVLCVTGLAKDCLITNILQELNDQIGLWLSPNFLIPSFIVSDNSSNVVHAIKDGGFTHVPCFLHCLNMVIQDFFCEHKSIENMLVAARKTCHHFSHSVKARQILQEFQNDHQLPWKNLKQDETGHWISTFYMLKWLLEHCYSVHHSLGRASGVVLTSLQWTLMTYVCDILKPFEEATQKVSVKTAGLNQVLPLIHHLLLSLQKLREDFQVRGITQALNLVDSLSLKLETDTLLSAMLKSKPCILATLLDPCFKNSLEDFFPQGADLETYKQFLAEEVCNYMESSPEICQIPTSEASCPSVTVGADSFTSSLKEGTSSSGSVDSSAVDNVALGSKSFMFPSAVAVVDEYFKEKYSEFSGGDDPLIYWQRKISIWPALTQVAIQYLSCPMCSWQSECIFTKNSHFHPKQIMSLDFDNIEQLMFLKMNLKNVNYDYSTLVLSWDPEQNEVVQSSEKEILP

SEQ ID NO: 15854 - protein, 429 aa, Homo Sapiens
MAQAPADPGREGHLEQRILQVLTEAGSPVKLAQLVKECQAPKRELNQVLYRMKKELKVSLTSPATWCLGGTDPEGEGPAELALSSPAERPQQHAATIPETPGPQFSQQREEDIYRFLKDNGPQRALVIAQALGMRTAKDVNRDLYRMKSRHLLDMDEQSKAWTIYRPEDSGRRAKSASIIYQHNPINMICQNGPNSWISIANSEAIQIGHGNIITRQTVSREDGSAGPRHLPSMAPGDSSTWGTLVDPWGPQDIHMEQSILRRVQLGHSNEMRLHGVPSEGPAHIPPGSPPVSATAAGPEASFEARIPSPGTHPEGEAAQRIHMKSCFLEDATIGNSNKMSISPGVAGPGGVAGSGEGEPGEDAGRRPADTQSRSHFPRDIGQPITPSHSKLTPKLETMTLGNRSHKAAEGSHYVDEASHEGSWWGGGI

SEQ ID NO: 15855 - protein, 577 aa, Homo Sapiens
MNKLYIGNLNESVTPADLEKVFAEHKISYSGQFLVKSGYAFVDCPDEHWAMKAIETFSGKVELQGKRLEIEHSVPKKQRSRKIQIRNIPPQLRWEVLDSLLAQYGTVENCEQVNTESETAVVNVTYSNREQTRQAIMKLNGHQLENHALKVSYIPDEQIAQGPENGRRGGFGSRGQPRQGSPVAAGAPAKQQQVDIPLRLLVPTQYVGAIIGKEGATIRNITKQTQSKIDVHRKENAGAAEKAISVHSTPEGCSSACKMILEIMHKEAKDTKTADEVPLKILAHNNFVGRLIGKEGRNLKKVEQDTETKITISSLQDLTLYNPERTITVKGAIENCCRAEQEIMKKVREAYENDVAAMSLQSHLIPGLNLAAVGLFPASSSAVPPPPSSVTGAAPYSSFMQAPEQEMVQVFIPAQAVGAIIGKKGQHIKQLSRFASASIKIAPPETPDSKVRMVIITGPPEAQFKAQGRIYGKLKEENFFGPKEEVKLETHIRVPASAAGRVIGKGGKTVNELQNLTAAEVVVPRDQTPDENDQVIVKIIGHFYASQMAQRKIRDILAQVKQQHQKGQSNQAQARRK

SEQ ID NO: 15856 - protein, 713 aa, Homo Sapiens
MAKPSHSSYVLQQLNNQREWGFLCDCCIAIDDIYFQAHKAVLAACSSYFRMFFMNHQHSTAQLNLSNMKISAECFDLILQFMYLGKIMTAPSSFEQFKVAMNYLQLYNVPDCLEDIQDADCSSSKCSSSASSKQNSKMIFGVRMYEDTVARNGNEANRWCAEPSSTVNTPHNREADEESLQLGNFPEPLFDVCKKSSVSKLSTPKERVSRRFGRSFTCDSCGFGFSCEKLLDEHVLTCTNRHLYQNTRSYHRIVDIRDGKDSNIKAEFGEKDSSKTFSAQTDKYRGDTSQAADDSASTTGSRKSSTVESEIASEEKSRAAERKRIIIKMEPEDIPTDELKDFNIIKVTDKDCNESTDNDELEDEPEEPFYRYYVEEDVSIKKSGRKTLKPRMSVSADERGGLENMRPPNNSSPVQEDAENASCELCGLTITEEDLSSHYLAKHIENICACGKCGQILVKGRQLQEHAQRCGEPQDLTMNGLGNTEEKMDLEENPDEQSEIRDMFVEMLDDFRDNHYQINSIQKKQLFKHSACPFRCPNCGQRFETENLVVEHMSSCLDQDMFKSAIMEENERDHRRKHFCNLCGKGFYQRCHLREHYTVHTKEKQFVCQTCGKQFLRERQLRLHNDMHKGMARYVCSICDQGNFRKHDHVRHMISHLSAGETICQVCFQIFPNNEQLEQHMDVHLYTCGICGAKFNLRKDMRSHYNAKHLKRT

SEQ ID NO: 15857 - protein, 871 aa, Homo Sapiens
MSFSEMNRRTLAFRGGGLVTASGGGSTNNNAGGEASAWPPQPQPRQPPPPAPPALQPPNGRGADEEVELEGLEPQDLEASAGPAAGAAEEAKELLLPQDAGGPTSLGGGAGGPLLAERNRRTLAFRGGGGGGLGNNGSSRGRPETSVWPLRHFNGRGPATVDLELDALEGKELMQDGASLSDSTEDEEEGASLGDGSGAEGGSCSSSRRSGGDGGDEVEGSGVGAGEGETVQHFPLARPKSLMQKLQCSFQTSWLKDFPWLRYSKDTGLMSCGWCQKTPADGGSVDLPPVGHDELSRGTRNYKKTLLLRHHVSTEHKLHEANAQESEIPSEEGYCDFNSRPNENSYCYQLLRQLNEQRKKGILCDVSIVVSGKIFKAHKNILVAGSRFFKTLYCFSNKESPNQNNTTHLDIAAVQGFSVILDFLYSGNLVLTSQNAIEVMTVASYLQMSEVVQTCRNFIKDALNISIKSEAPESVVVDYNNRKPVNRDGLSSSRDQKIASFWATRNLTNLASNVKIENDGCNVDEGQIENYQMNDSSWVQDGSPEMAENESEGQTKVFIWNNMGSQGIQETGKTRRKNQTTKRFIYNIPPNNETNLEDCSVMQPPVAYPEENTLLIKEEPDLDGALLSGPDGDRNVNANLLAEAGTSQDGGDAGTSHDFKYGLMPGPSNDFKYGLIPGTSNDFKYGLIPGASNDFKYGLLPESWPKQETWENGESSLIMNKLKCPHCSYVAKYRRTLKRHLLIHTGVRSFSCDICGKLFTRREHVKRHSLVHKKDKKYKCMVCKKIFMLAASVGIRHGSRRYGVCVDCADKSQPGGQEGVDQGQDTEFPRDEEYEENEVGEADEELVDDGEDQNDPSRWDESGEVCMSLDD

SEQ ID NO: 15858 - protein, 1053 aa, Homo Sapiens
MSSEESYRAILRYLTNEREPYAPGTEGNVKRKIRKAAACYVVRGGTLYYQRRQRHRKTFAELEVVLQPERRRDLIEAAHLGPGGTHHTRHQTWHYLSKTYWWRGILKQVKDYIKQCSKCQEKLDRSRPISDVSEMLEELGLDLESGEESNESEDDLSNFTSSPTTASKPAKKKPVSKHELVFVDTKGVVKRSSPKHCQAVLKQLNEQRLSNQFCDVTLLIEGEEYKAHKSVLSANSEYFRDLFIEKGAVSSHEAVVDLSGFCKASFLPLLEFAYTSVLSFDFCSMADVAILARHLFMSEVLEICESVHKLMEEKQLTVYKKGEVQTVASTQDLRVQNGGTAPPVASSEGTTTSLPTELGDCEIVLLVNGELPEAEQNGEVGRQPEPQVSSEAESALSSVGCIADSHPEMESVDLITKNNQTELETSNNRENNTVSNIHPKLSKENVISSSPEDSGMGNDISAEDICAEDIPKHRQKVDQPLKDQENLVASTAKTDFGPDDDTYRSRLRQRSVNEGAYIRLHKGMEKKLQKRKAVPKSAVQQVAQKLVQRGKKMKQPKRDAKENTEEASHKCGECGMVFQRRYALIMHKLKHERARDYKCPLCKKQFQYSASLRAHLIRHTRKDAPSSSSSNSTSNEASGTSSEKGRTKREFICSICGRTLPKLYSLRIHMLKHTGVKPHACQVCGKTFIYKHGLKLHQSLHQSQKQFQCELCVKSFVTKRSLQEHMSIHTGESKYLCSVCGKSFHRGSGLSKHFKKHQPKPEVRGYHCTQCEKSFFEARDLRQHMNKHLGVKPFQCQFCDKCYSWKKDWYSHVKSHSVTEPYRCNICGKEFYEKALFRRHVKKATHGKKGRAKQNLERVCEKCGRKFTQLREYRRHMNNHEGVKPFECLTCGVAWADARSLKRHVRTHTGERPYVCPVCSEAYIDARTLRKHMTKFHRDYVPCKIMLEKDTLQFHNQGTQVAHAVSILTAGMQEQESSGPQELETVVVTGETMEALEAVAATEEYPSVSTLSDQSIMQVVNYVLAQQQGQKLSEVAEAIQTVKVEVAHISGGE

SEQ ID NO: 15859 - protein, 459 aa, Homo Sapiens
MASGVEVLRFQLPGHEAATLRNMNQLRAEERFCDVTIVADSLKFRGHKVILAACSPFLRDQFLLNPSSELQVSLMHSARIVADLLLSCYTGALEFAVRDIVNYLTAASYLQMEHVVEKCRNALSQFIEPKIGLKEDGVSEASLVSSISATKSLLPPARTPKPAPKPPPPPPLPPPLLRPVKLEFPLDEDLELKAEEEDEDEDEDVSDICIVKVESALEVAHRLKPPGGLGGGLGIGGSVGGHLGELAQSSVPPSTVAPPQGVVKACYSLSEDAEGEGLLLIPGGRASVGATSGLVEAAAVAMAARGAGGSLGAGGSRGPLPGGFSGGNPLKNIKCTKCPEVFQGVEKLVFHMRAQHFIFMCPRCGKQFNHSSNLNRHMNVHRGVKSHSCGICGKCFTQKSTLHDHLNLHSGARPYRCSYCDVRFAHKPAIRRHLKEQHGKTTAENVLEASVAEINVLIR

SEQ ID NO: 15860 - protein, 449 aa, Homo Sapiens
MEFFISMSETIKYNDDDHKTLFLKTLNEQRLEGEFCDIAIVVEDVKFRAHRCVLAACSTYFKKLFKKLEVDSSSVIEIDFLRSDIFEEVLNYMYTAKISVKKEDVNLMMSSGQILGIRFLDKLCSQKRDVSSPDENNGQSKSKYCLKINRPIGDAADTQDDDVEEIGDQDDSPSDDTVEGTPPSQEDGKSPTTTLRVQEAILKELGSEEVRKVNCYGQEVESMETPESKDLGSQTPQALTFNDGMSEVKDEQTPGWTTAASDMKFEYLLYGHHREQIACQACGKTFSDEGRLRKHEKLHTADRPFVCEMCTKGFTTQAHLKEHLKIHTGYKPYSCEVCGKSFIRAPDLKKHERVHSNERPFACHMCDKAFKHKSHLKDHERRHRGEKPFVCGSCTKAFAKASDLKRHENNMHSERKQVTPSAIQSETEQLQAAAMAAEAEQQLETIACS

SEQ ID NO: 15861 - protein, 673 aa, Homo Sapiens; identical to SEQ ID NO: 15499

SEQ ID NO: 15862 - protein, 803 aa, Homo Sapiens
MDFPQHSQHVLEQLNQQRQLGLLCDCTFVVDGVHFKAHKAVLAACSEYFKMLFVDQKDVVHLDISNAAGLGQVLEFMYTAKLSLSPENVDDVLAVATFLQMQDIITACHALKSLAEPATSPGGNAEALATEGGDKRAKEEKVATSTLSRLEQAGRSTPIGPSRDLKEERGGQAQSAASGAEQTEKADAPREPPPVELKPDPTSGMAAAEAEAALSESSEQEMEVEPARKGEEEQKEQEEQEEEGAGPAEVKEEGSQLENGEAPEENENEESAGTDSGQELGSEARGLRSGTYGDRTESKAYGSVIHKCEDCGKEFTHTGNFKRHIRIHTGEKPFSCRECSKAFSDPAACKAHEKTHSPLKPYGCEECGKSYRLISLLNLHKKRHSGEARYRCEDCGKLFTTSGNLKRHQLVHSGEKPYQCDYCGRSFSDPTSKMRHLETHDTDKEHKCPHCDKKFNQVGNLKAHLKIHIADGPLKCRECGKQFTTSGNLKRHLRIHSGEKPYVCIHCQRQFADPGALQRHVRIHTGEKPCQCVMCGKAFTQASSLIAHVRQHTGEKPYVCERCGKRFVQSSQLANHIRHHDNIRPHKCSVCSKAFVNVGDLSKHIIIHTGEKPYLCDKCGRGFNRVDNLRSHVKTVHQGKAGIKILEPEEGSEVSVVTVDDMVTLATEALAATAVTQLTVVPVGAAVTADETEVLKAEISKAVKQVQEEDPNTHILYACDSCGDKFLDANSLAQHVRIHTAQALVMFQTDADFYQQYGPGGTWPAGQVLQAGELVFRPRDGAEGQPALAETSPTAPECPPPAE

SEQ ID NO: 15863 - protein, 522 aa, Homo Sapiens
MEFPDHSRHLLQCLSEQRHQGFLCDCTVLVGDAQFRAHRAVLASCSMYFHLFYKDQLDKRDIVHLNSDIVTAPAFALLLEFMYEGKLQFKDLPIEDVLAAASYLHMYDIVKVCKKKLKEKATTEADSTKKEEDASSCSDKVESLSDGSSHIAGDLPSDEDEGEDEKLNILPSKRDLAAEPGNMWMRLPSDSAGIPQAGGEAEPHATAAGKTVASPCSSTESLSQRSVTSVRDSADVDCVLDLSVKSSLSGVENLNSSYFSSQDVLRSNLVQVKVEKEASCDESDVGTNDYDMEHSTVKESVSTNNRVQYEPAHLAPLREDSVLRELDREDKASDDEMMTPESERVQVEGGMESSLLPYVSNILSPAGQIFMCPLCNKVFPSPHILQIHLSTHFREQDGIRSKPAADVNVPTCSLCGKTFSCMYTLKRHERTHSGEKPYTCTQCGKSFQYSHNLSRHAVVHTREKPHACKWCERRFTQSGDLYRHIRKFHCELVNSLSVKSEALSLPTVRDWTLEDSSQELWK

SEQ ID NO: 15864 - protein, 514 aa, Homo Sapiens
MDLANHGLILLQQLNAQREFGFLCDCTVAIGDVYFKAHKSVLASFSNYFKMLFVHQTSECVRLKPTDIQPDIFSYLLHLMYTGKMAPQLIDPVRLEQGIKFLHAYPLIQEASLASQGAFSHPDQVFPLASSLYGIQIADHQLRQATKIASAPEKLGRDPRPQTSRISQEQVPEASQLSQLTSNLAQVNRTNMTPSDPLQTSLSPELVSTPVPPPPPGEETNLEASSSDEQPASLTIAHVKPSIMKRNGSFPKYYACHLCGRRFTLRSSLREHLQIHTGVPFTSSQQGESRVPLTLCSNAADLGKDAMEVPEAGMISDSELQHISDSPIIDGQQQSETPPPSDIADIDNLEQADQEREVKRRKYECTICGRKFIQKSHWREHMYIHTGKPFKCSTCDKSFCRANQAARHVCLNQSIDTYTMVDKQTLELCTFEEGSQMDNMLVQTNKPYKCNLCDKTFSTPNEVVKHSCQNQNSDVFALDEGRSILLGSGDSEVTEPDHPVLASIKKEQETVLLD

SEQ ID NO: 15865 - protein, 741 aa, Homo Sapiens
MLERKKPKTAENQKASEENEITQPGGSSAKPGLPCLNFEAVLSPDPALIHSTHSLTNSHAHTGSSDCDISCKGMTERIHSINLHNFSNSVLETLNEQRNRGHFCDVTVRIHGSMLRAHRCVLAAGSPFFQDKLLLGYSDIEIPSVVSVQSVQKLIDFMYSGVLRVSQSEALQILTAASILQIKTVIDECTRIVSQNVGDVFPGIQDSGQDTPRGTPESGTSGQSSDTESGYLQSHPQHSVDRIYSALYACSMQNGSGERSFYSGAVVSHHETALGLPRDHHMEDPSWITRIHERSQQMERYLSTTPETTHCRKQPRPVRIQTLVGNIHIKQEMEDDYDYYGQQRVQILERNESEECTEDTDQAEGTESEPKGESFDSGVSSSIGTEPDSVEQQFGPGAARDSQAEPTQPEQAAEAPAEGGPQTNQLETGASSPERSNEVEMDSTVITVSNSSDKSVLQQPSVNTSIGQPLPSTQLYLRQTETLTSNLRMPLTLTSNTQVIGTAGNTYLPALFTTQPAGSGPKPFLFSLPQPLAGQQTQFVTVSQPGLSTFTAQLPAPQPLASSAGHSTASGQGEKKPYECTLCNKTFTAKQNYVKHMFVHTGEKPHQCSICWRSFSLKDYLIKHMVTHTGVRAYQCSICNKRFTQKSSLNVHMRLHRGEKSYECYICKKKFSHKTLLERHVALHSASNGTPPAGTPPGARAGPPGVVACTEGTTYVCSVCPAKFDQIEQFNDHMRMHVSDG

SEQ ID NO: 15866 - protein, 1066 aa, Homo Sapiens
MEGLLHYINPAHAISLLSALNEERLKGQLCDVLLIVGDQKFRAHKNVLAASSEYFQSLFTNKENESQTVFQLDFCEPDAFDNVLNYIYSSSLFVEKSSLAAVQELGYSLGISFLTNIVSKTPQAPFPTCPNRKKVFVEDDENSSQKRSVIVCQSRNEAQGKTVSQNQPDVSHTSRPSPSIAVKANTNKPHVPKPIEPLHNLSLTEKSWPKDSSVVYAKSLEHSGSLDDPNRISLVKRNAVLPSKPLQDREAMDDKPGVSGQLPKGKALELALKRPRPPVLSVCSSSETPYLLKETNKGNGQGEDRNLLYYSKLGLVIPSSGSGSGNQSIDRSGPLVKSLLRRSLSMDSQVPVYSPSIDLKSSQGSSSVSSDAPGNVLCALSQKSSLKDCSEKTALDDRPQVLQPHRLRSFSASQSTDREGASPVTEVRIKTEPSSPLSDPSDIIRVTVGDAATTAAASSSSVTRDLSLKTEDDQKDMSRLPAKRRFQADRRLPFKKLKVNEHGSPVSEDNFEEGSSPTLLDADFPDSDLNKDEFGELEGTRPNKKFKCKHCLKIFRSTAGLHRHVNMYHNPEKPYACDICHKRFHTNFKVWTHCQTQHGIVKNPSPASSSHAVLDEKFQRKLIDIVREREIKKALIIKLRRGKPGFQGQSSSQAQQVIKRNLRSRAKGAYICTYCGKAYRFLSQFKQHIKMHPGEKPLGVNKVAKPKEHAPLASPVENKEVYQCRLCNAKLSSLLEQGSHERLCRNAAVCPYCSLRFFSPELKQEHESKCEYKKLTCLECMRTFKSSFSIWRHQVEVHNQNNMAPTENFSLPVLDHNGDVTGSSRPQSQPEPNKVNHIVTTKDDNVFSDSSEQVNFDSEDSSCLPEDLSLSKQLKIQVKEEPVEEAEEEAPEASTAPKEAGPSKEASLWPCEKCGKMFTVHKQLERHQELLCSVKPFICHVCNKAFRTNFRLWSHFQSHMSQASEESAHKESEVCPVPTNSPSPPPLPPPPPLPKIQPLEPDSPTGLSENPTPATEKLFVPQESDTLFYHAPPLSAITFKRQFMCKLCHRTFKTAFSLWSHEQTHN

SEQ ID NO: 15867 - protein, 634 aa, Homo Sapiens
MEPSPLSPSGAALPLPLSLAPPPLPLPAAAVVHVSFPEVTSALLESLNQQRLQGQLCDVSIRVQGREFRAHRAVLAASSPYFHDQVLLKGMTSISLPSVMDPGAFETVLASAYTGRLSMAAADIVNFLTVGSVLQMWHIVDKCTELLREGRASATTTITTAAATSVTVPGAGVPSGSGGTVAPATMGSARSHASSRASENQSPSSSNYFSPRESTDFSSSSQEAFAASAVGSGERRGGGPVFPAPVVGSGGATSGKLLLEADELCDDGGDGRGAVVPGAGLRRPTYTPPSIMPQKHWVYVKRGGNCPAPTPLVPQDPDLEEEEEEEDLVLTCEDDEDEELGGSSRVPVGGGPEATLSISDVRTLSEPPDKGEEQVNFCESSNDFGPYEGGGPVAGLDDSGGPTPSSYAPSHPPRPLLPLDMQGNQILVFPSSSSSSSSQAPGQPPGNQAEHGAVTVGGTSVGSLGVPGSVGGVPGGTGSGDGNKIFLCHCGKAFSHKSMRDRHVNMHLNLRPFDCPVCNKKFKMKHHLTEHMKTHTGLKPYECGVCAKKFMWRDSFMRHRGHCERRHRLGGVGAVPGPGTPTGPSLPSKRESPGVGGGSGDEASAATPPSSRRVWSPPRVHKVEMGFGGGGGAN

SEQ ID NO: 15868 - protein, 697 aa, Homo Sapiens
MAETSPEPSGQLVVHSDAHSDTVLASFEDQRKKGFLCDITLIVENVHFRAHKALLAASSEYFSMMFAEEGEIGQSIYMLEGMVADTFGILLEFIYTGYLHASEKSTEQILATAQFLKVYDLVKAYTDFQNNHSSPKPTTLNTAGAPVVVISNKKNDPPKRKRGRPKKVNTLQEEKSELAAEEEIQLRVNNSVQNRQNFVVKGDSGVLNEQIAAKEKEESEPTCEPSREEEMPVEKDENYDPKTEDGQASQSRYSKRRIWRSVKLKDYKLVGDQEDHGSAKRICGRRKRPGGPEARCKDCGKVFKYNHFLAIHQRSHTGERPFKCNECGKGFAQKHSLQVHTRMHTGERPYTCTVCSKALTTKHSLLEHMSLHSGQKSFTCDQCGKYFSQNRQLKSHYRVHTGHSLPECKDCHRKFMDVSQLKKHLRTHTGEKPFTCEICGKSFTAKSSLQTHIRIHRGEKPYSCGICGKSFSDSSAKRRHCILHTGKKPFSCPECNLQFARLDNLKAHLKIHSKEKHASDASSISGSSNTEEVRNILQLQPYQLSTSGEQEIQLLVTDSVHNINFMPGPSQGISIVTAESSQNMTADQAANLTLLTQQPEQLQNLILSAQQEQTEHIQSLNMIESQMGPSQTEPVHVITLSKETLEHLHAHQEQTEELHLATSTSDPAQHLQLTQEPGPPPPTHHVPQPTPLGQEQS

SEQ ID NO: 15869 - protein, 435 aa, Homo Sapiens
MDTASHSLVLLQQLNMQREFGFLCDCTVAIGDVYFKAHRAVLAAFSNYFKMIFIHQTSECIKIQPTDIQPDIFSYLLHIMYTGKGPKQIVDHSRLEEGIRFLHADYLSHIATEMNQVFSPETVQSSNLYGIQISTTQKTVVKQGLEVKEAPSSNSGNRAAVQGDHPQLQLSLAIGLDDGTADQQRACPATQALEEHQKPPVSIKQERCDPESVISQSHPSPSSEVTGPTFTENSVKIHLCHYCGERFDSRSNLRQHLHTHVSGSLPFGVPASILESNDLGEVHPLNENSEALECRRLSSFIVKENEQQPDHTNRGTTEPLQISQVSLISKDTEPVELNCNFSFSRKRKMSCTICGHKFPRKSQLLEHMYTHKGKSYRYNRCQRFGNALAQRFQPYCDSWSDVSLKSSRLSQEHLDLPCALESELTQENVDTILVE

SEQ ID NO: 15870 - protein, 441 aa, Homo Sapiens
MSERSDLLHFKFENYGDSMLQKMNKLREENKFCDVTVLIDDIEVQGHKIVFAAGSPFLRDQFLLNDSREVKISILQSSEVGRQLLLSCYSGVLEFPEMELVNYLTAASFLQMSHIVERCTQALWKFIKPKQPMDSKEGCEPQSASPQSKEQQGDARGSPKQDSPCIHPSEDSMDMEDSDIQIVKVESIGDVSEVRSKKDQNQFISSEPTALHSSEPQHSLINSTVENRVSEIEQNHLHNYALSYTGSDNIIMASKDVFGPNIRGVDKGLQWHHQCPKCTRVFRHLENYANHLKMHKLFMCLLCGKTFTQKGNLHRHMRVHAGIKPFQCKICGKTFSQKCSLQDHLNLHSGDKPHKCNYCDMVFAHKPVLRKHLKQLHGKNSFDNANERNVQDLTVDFDSFACTTVTDSKGCQPQPDATQVLDAGKLAQAVLNLRNDSTCVN

SEQ ID NO: 15871 - protein, 574 aa, Homo Sapiens
MLREFSKWGVEASPGKAWERKRSLLRGAVGRYRGATGGDLFWAPFPSWGTMEFPEHSQQLLQSLREQRSQGFLCDCTVMVGSTQFLAHRAVLASCSPFFQLFYKERELDKRDLVCIHNEIVTAPAFGLLLDFMYAGQLTLRGDTPVEDVLAAASYLHMNDIVKVCKRRLQARALAEADSTKKEEETNSQLPSLEFLSSTSRGTQPSLASAETSGHWGKGEWKGSAAPSPTVRPPDEPPMSSGADTTQPGMEVDAPHLRAPHPPVADVSLASPSSSTETIPTNYFSSGISAVSLEPLPSLDVGPESLRVVEPKDPGGPLQGFYPPASAPTSAPAPVSAPVPSQAPAPAEAELVQVKVEAIVISDEETDVSDEQPQGPERAFPSGGAVYGAQPSQPEAFEDPGAAGLEEVGPSDHFLPTDPHLPYHLLPGAGQYHRGLVTSPLPAPASLHEPLYLSSEYEAAPGSFGVFTEDVPTCKTCGKTFSCSYTLRRHATVHTRERPYECRYCLRSYTQSGDLYRHIRKAHNEDLAKRSKPDPEVGPLLGVQPLPGSPTADRQSSSGGGPPKDFVLAPKTNI

SEQ ID NO: 15872 - protein, 487 aa, Homo Sapiens
MSLPPIRLPSPYGSDRLVQLAARLRPALCDTLITVGSQEFPAHSLVLAGVSQQLGRRGQWALGEGISPSTFAQLLNFVYGESVELQPGELRPLQEAARALGVQSLEEACWRARGDRAKKPDPGLKKHQEEPEKPSRNPERELGDPGEKQKPEQVSRTGGREQEMLHKHSPPRGRPEMAGATQEAQQEQTRSKEKRLQAPVGQRGADGKHGVLTWLRENPGGSEESLRKLPGPLPPAGSLQTSVTPRPSWAEAPWLVGGQPALWSILLMPPRYGIPFYHSTPTTGAWQEVWREQRIPLSLNAPKGLWSQNQLASSSPTPGSLPQGPAQLSPGEMEESDQGHTGALATCAGHEDKAGCPPRPHPPPAPPARSRPYACSVCGKRFSLKHQMETHYRVHTGEKPFSCSLCPQRSRDFSAMTKHLRTHGAAPYRCSLCGAGCPSLASMQAHMRGHSPSQLPPGWTIRSTFLYSSSRPSRPSTSPCCPSSSTT

SEQ ID NO: 15873 - protein, 672 aa, Homo Sapiens
MESRKLISATDIQYSGSLLNSLNEQRGHGLFCDVTVIVEDRKFRAHKNILSASSTYFHQLFSVAGQVVELSFIRAEIFAEILNYIYSSKIVRVRSDLLDELIKSGQLLGVKFIAELGVPLSQVKSISGTAQDGNTEPLPPDSGDKNLVIQKSKDEAQDNGATIMPIITESFSLSAEDYEMKKIIVTDSDDDDDDVIFCSEILPTKETLPSNNTVAQVQSNPGPVAISDVAPSASNNSPPLTNITPTQKLPTPVNQATLSQTQGSEKLLVSSAPTHLTPNIILLNQTPLSTPPNVSSSLPNHMPSSINLLVQNQQTPNSAILTGNKANEEEEEEIIDDDDDTISSSPDSAVSNTSLVPQADTSQNTSFDGSLIQKMQIPTLLQEPLSNSLKISDIITRNTNDPGVGSKHLMEGQKIITLDTATEIEGLSTGCKVYANIGEDTYDIVIPVKDDPDEGEARLENEIPKTSGSEMANKRMKVKHDDHYELIVDGRVYYICIVCKRSYVCLTSLRRHFNIHSWEKKYPCRYCEKVFPLAEYRTKHEIHHTGERRYQCLACGKSFINYQFMSSHIKSVHSQDPSGDSKLYRLHPCRSLQIRQYAYLSDRSSTIPAMKDDGIGYKVDTGKEPPVGTTTSTQNKPMTWEDIFIQQENDSIFKQNVTDGSTEFEFIIPESY

SEQ ID NO: 15874 - protein, 500 aa, Homo Sapiens
MDSSSFIQFDVPEYSSTVLSQLNELRLQGKLCDIIVHIQGQPFRAHKAVLAASSPYFRDHSALSTMSGLSISVIKNPNVFEQLLSFCYTGRMSLQLKDVVSFLTAASFLQMQCVIDKCTQILESIHSKISVGDVDSVTVGAEENPESRNGVKDSSFFANPVEISPPYCSQGRQPTASSDLRMETTPSKALRSRLQEEGHSDRGSSGSVSEYEIQIEGDHEQGDLLVRESQITEVKVKMEKSDRPSCSDSSSLGDDGYHTEMVDGEQVVAVNVGSYGSVLQHAYSYSQAASQPTNVSEAFGSLSNSSPSRSMLSCFRGGRARQKRALSVHLHSDLQGLVQGSDSEAMMNNPGYESSPRERSARGHWYPYNERLICIYCGKSFNQKGSLDRHMRLHMGITPFVCKFCGKKYTRKDQLEYHIRGHTDDKPFRCEICGKCFPFQGTLNQHLRKNHPGVAEVRSRIESPERTDVYVEQKLENDASASEMGLDSRMEIHTVSDAPD

SEQ ID NO: 15875 - protein, 503 aa, Homo Sapiens
MEKGGNIQLEIPDFSNSVLSHLNQLRMQGRLCDIVVNVQGQAFRAHKVVLAASSPYFRDHMSLNEMSTVSISVIKNPTVFEQLLSFCYTGRICLQLADIISYLTAASFLQMQHIIDKCTQILEGIHFKINVAEVEAELSQTRTKHQERPPESHRVTPNLNRSLSPRHNTPKGNRRGQVSAVLDIRELSPPEESTSPQIIEPSSDVESREPILRINRAGQWYVETGVADRGGRSDDEVRVLGAVHIKTENLEEWLGPENQPSGEDGSSAEEVTAMVIDTTGHGSVGQENYTLGSSGAKVARPTSSEVDRFSPSGSVVPLTERHRARSESPGRMDEPKQPSSQVEESAMMGVSGYVEYLREQEVSERWFRYNPRLTCIYCAKSFNQKGSLDRHMRLHMGITPFVCRMCGKKYTRKDQLEYHIRKHTGNKPFHCHVCGKSFPFQAILNQHFRKNHPGCIPLEGPHSISPETTVTSRGQAEEESPSQEETVAPGEAVQGSVSTTGPD

SEQ ID NO: 15876 - protein, 1195 aa, Homo Sapiens
MTVMSLSRDLKDDFHSDTVLSILNEQRIRGILCDVTIIVEDTKFKAHSNVLAASSLYFKNIFWSHTICISSHVLELDDLKAEVFTEILNYIYSSTVVVKRQETVTDLAAAGKKLGISFLEDLTDRNFSNSPGPYVFCITEKGVVKEEKNEKRHEEPAITNGPRITNAFSIIETENSNNMFSPLDLRASFKKVSDSMRTASLCLERTDVCHEAEPVRTLAEHSYAVSSVAEAYRSQPVREHDGSSPGNTGKENCEALAAKPKTCRKPKTFSIPQDSDSATENIPPPPVSNLEVNQERSPQPAAVLTRSKSPNNEGDVHFSREDENQSSDVPGPPAAEVPPLVYNCSCCSKAFDSSTLLSAHMQLHKPTQEPLVCKYCNKQFTTLNRLDRHEQICMRSSHMPIPGGNQRFLENYPTIGQNGGSFTGPEPLLSENRIGEFSSTGSTLPDTDHMVKFVNGQMLYSCVVCKRSYVTLSSLRRHANVHSWRRTYPCHYCNKVFALAEYRTRHEIWHTGERRYQCIFCLETFMTYYILKNHQKSFHAIDHRLSISKKTANGGLKPSVYPYKLYRLLPMKCKRAPYKSYRNSSYENARENSQMNESAPGTYVVQNPHSSELPTLNFQDTVNTLTNSPAIPLETSACQDIPTSANVQNAEGTKWGEEALKMDLDNNFYSTEVSVSSTENAVSSDLRAGDVPVLSLSNSSENAASVISYSGSAPSVIVHSSQFSSVIMHSNAIAAMTSSNHRAFSDPAVSQSLKDDSKPEPDKVGRFASRPKSIKEKKKTTSHTRGEIPEESNYVADPGGSLSKTTNIAEETSKIETYIAKPALPGTSTNSNVAPLCQITVKIGNEAIVKRHILGSKLFYKRGRRPKYQMQEEPLPQGNDPEPSGDSPLGLCQSECMEMSEVFDDASDQDSTDKPWRPYYNYKPKKKSRQLKKMRKVNWRKEHGNRSPSHKCKYPAELDCAVGKAPQDKPFEEEETKEMPKLQCELCDGDKAVGAGNQGRPHRHLTSRPYACELCAKQFQSPSTLKMHMRCHTGEKPYQCKTCGRCFSVQGNLQKHERIHLGLKEFVCQYCNKAFTLNETLKIHERIHTGEKRYHCQFCFQRFLYLSTKRNHEQRHIREHNGKGYACFQCPKICKTAAALGMHQKKHLFKSPSQQEKIGDVCHENSNPLENQHFIGSEDNDQKDNIQTGVENVVL

SEQ ID NO: 15877 - protein, 712 aa, Homo Sapiens
MGMRIKLQSTNHPNNLLKELNKCRLSETMCDVTIVVGSRSFPAHKAVLACAAGYFQNLFLNTGLDAARTYVVDFITPANFEKVLSFVYTSELFTDLINVGVIYEVAERLGMEDLLQACHSTFPDLESTARAKPLTSTSESHSGTLSCPSAEPAHPLGELRGGGDYLGADRNYVLPSDAGGSYKEEEKNVASDANHSLHLPQPPPPPPKTEDHDTPAPFTSIPSMMTQPLLGTVSTGIQTSTSSCQPYKVQSNGDFSKNSFLTPDNAVDITTGTNSCLSNSEHSKDPGFGQMDELQLEDLGDDDLQFEDPAEDIGTTEEVIELSDDSEDELAFGENDNRENKAMPCQVCKKVLEPNIQLIRQHARDHVDLLTGNCKVCETHFQDRNSRVTHVLSHIGIFLFSCDMCETKFFTQWQLTLHRRDGIFENNIIVHPNDPLPGKLGLFSGAASPELKCAACGKVLAKDFHVVRGHILDHLNLKGQACSVCDQRHLNLCSLMWHTLSHLGISVFSCSVCANSFVDWHLLEKHMAVHQSLEDALFHCRLCSQSFKSEAAYRYHVSQHKCNSGLDARPGFGLQHPALQKRKLPAEEFLGEELALQGQPGNSKYSCKVCGKRFAHTSEFNYHRRIHTGEKPYQCKVCHKFFRGRSTIKCHLKTHSGALMYRCTVCGHYSSTLNLMSKHVGVHKGSLPPDFTIEQTFMYIIHSKEADKNPDS

SEQ ID NO: 15878 - protein, 1013 aa, Homo Sapiens
MPPPAEVTDPSHAPAVLRQLNEQRLRGLFCDVTLIAGDTKFPAHRSVLAASSPFFREALLTSAPLPLPPATGGAAPNPATTTAASSSSSSSSSSSSSSSSASSSSSSSSSSPPPASPPASSPPRVLELPGVPAAAFSDVLNFIYSARLALPGGGGDGAAVAEIGALGRRLGISRLQGLGEGGDAWVPPTPAPMATSQPEEDSFGPGPRPAGEWEGDRAEAQAPDLQCSLPRRPLPCPQCGKSFIHPKRLQTHEAQCRRGASTRGSTGLGAGGAGPGGPAGVDASALPPPVGFRGGPEHVVKVVGGHVLYVCAACERSYVTLSSLKRHSNVHSWRRKYPCRYCEKVFALAEYRTKHEVWHTGERRYQCIFCWETFVTYYNLKTHQRAFHGISPGLLASEKTPNGGYKPKLNTLKLYRLLPMRAAKRPYKTYSQGAPEAPLSPTLNTPAPVAMPASPPPGPPPAPEPGPPPSVITFAHPAPSVIVHGGSSSGGGGSGTASTGGSQAASVITYTAPPRPPKKREYPPPPPEPAATPTSPATAVSPATAAGPAMATTTEEAKGRNPRAGRTLTYTAKPVGGIGGGGGPPTGAGRGPSQLQAPPPLCQITVRIGEEAIVKRRISETDLRPGELSGEEMEESEEDEEEEDEEEEEEDEEESKAGGEDQLWRPYYSYKPKRKAGAAGGASVGGSGLPRGRRPPRWRQKLERRSWEETPAAESPAGRARTERRHRCGDCAQTFTTLRKLRKHQEAHGGGSHSSRAGRRPSTRFTCPHCAKVCKTAAALSRHGQRHAAERPGGTPTPVIAYSKGSAGTRPGDVKEEAPQEMQVSSSSGEAGGGSTAAEEASETASLQDPIISGGEEPPVVASGGSYVYPPVQEFPLALIGGGREPGGGRGKSGSEGPVGAGEGDRMEGIGAAKVTFYPEPYPLVYGPQLLAAYPYNFSNLAALPVALNMVLPDEKGAGALPFLPGVFGYAVNPQAAPPAPPTPPPPTLPPPIPPKGEGERAGVERTQKGDVG

SEQ ID NO: 15879 - protein, 1239 aa, Homo Sapiens
MELPNYSRQLLQQLYTLCKEQQFCDCTISIGTIYFRAHKLVLAAASLLFKTLLDNTDTISIDASVVSPEEFALLLEMMYTGKLPVGKHNFSKIISLADSLQMFDVAVSCKNLLTSLVNCSVQGQVVRDVSAPSSETFRKEPEKPQVEILSSEGAGEPHSSPELAATPGGPVKAETEEAAHSVSQEMSVNSPTAQESQRNAETPAETPTTAEACSPSPAVQTFSEAKKTSTEPGCERKHYQLNFLLENEGVFSDALMVTQDVLKKLEMCSEIKGPQKEMIVKCFEGEGGHSAFQRILGKVREESLDVQTVVSLLRLYQYSNPAVKTALLDRKPEDVDTVQPKGSTEEGKTLSVLLLEHKEDLIQCVTQLRPIMESLETAKEEFLTGTEKRVILNCCEGRTPKETIENLLHRMTEEKTLTAEGLVKLLQAVKTTFPNLGLLLEKLQKSATLPSTTVQPSPDDYGTELLRRYHENLSEIFTDNQILLKMISHMTSLAPGEREVMEKLVKRDSGSGGFNSLISAVLEKQTLSATAIWQLLLVVQETKTCPLDLLMEEIRREPGADAFFRAVTTPEHATLETILRHNQLILEAIQQKIEYKLFTSEEEHLAETVKEILSIPSETASPEASLRAVLSRAMEKSVPAIEICHLLCSVHKSFPGLQPVMQELAYIGVLTKEDGEKETWKVSNKFHLEANNKEDEKAAKEDSQPGEQNDQGETGSLPGQQEKEASASPDPAKKSFICKACDKSFHFYCRLKVHMKRCRVAKSKQVQCKECSETKDSKKELDKHQLEAHGAGGEPDAPKKKKKRLPVTCDLCGREFAHASGMQYHKLTEHFDEKPFSCEECGAKFAANSTLKNHLRLHTGDRPFMCKHCLMTFTQASALAYHTKKKHSEGKMYACQYCDAVFAQSIELSRHVRTHTGDKPYVCRDCGKGFRQANGLSIHLHTFHNIEDPYDCKKCRMSFPTLQDHRKHIHEVHSKEYHPCPTCGKIFSAPSMLERHVVTHVGGKPFSCGICNKAYQQLSGLWYHNRTHHPDVFAAQNHRSSKFSSLQCSSCDKTFPNTIEHKKHIKAEHADMKFHECDQCKELFPTPALLQVHVKCQHSGSQPFRCLYCAATFRFPGALQHHVTTEHFKQSETTFPCELCGELFTSQAQLDSHLESEHPKVMSTETQAAASQMAQVIQTPEPVAPTEQVITLEETQLAGSQVFVTLPDSQASQASSELVAVTVEDLLDGTVTLICGEAK

SEQ ID NO: 15880 - protein, 909 aa, Homo Sapiens
MKKRRKVTSNLEKIHLGYHKDSSEGNVAVECDQVTYTHSAGRPTPEALHCYQELPPSPDQRKLLSSLQYNKNLLKYLNDDRQKQPSFCDLLIIVEGKEFSAHKVVVAVGSSYFHACLSKNPSTDVVTLDHVTHSVFQHLLEFLYTSEFFVYKYEIPLVLEAAKFLDIIDAVKLLNNENVAPFHSELTEKSSPEETLNELTGRLSNNHQCKFCSRHFCYKKSLENHLAKTHRSLLLGKKHGLKMLERSFSARRSKRNRKCPVKFDDTSDDEQESGDGSDNLNQENFDKEKSDRNDSEDPGSEYNAEEDELEEEMSDEYSDIEEQSEKDHNDAEEEPEAGDSVGNVHEGLTPVVIQNSNKKILQCPKCDKTFDRIGKYESHTRVHTGEKPFECDICHQRYSTKSNLTVHRKKHSNETEFHKKEHKCPYCNKLHASKKTLAKHVKRFHPENAQEFISIKKTKSESWKCDICKKSFTRRPHLEEHMILHSQDKPFKCTYCEEHFKSRFARLKHQEKFHLGPFPCDICGRQFNDTGNLKRHIECTHGGKRKWTCFICGKSVRERTTLKEHLRIHSGEKPHLCSICGQSFRHGSSYRLHLRVHHDDKRYECDECGKTFIRHDHLTKHKKIHSGEKAHQCEECGKCFGRRDHLTVHYKSVHLGEKVWQKYKATFHQCDVCKKIFKGKSSLEMHFRTHSGEKPYKCQICNQSFRIKKTLTKHLVIHSDARPFNCQHCNATFKRKDKLKYHIDHVHEIKSPDDPLSTSEEKLVSLPVEYSSDDKIFQTETKQYMDQPKVYQSEAKTMLQNVSAEVCVPVTLVPVQMPDTPSDLVRHTTTLPPSSHEILSPQPQSTDYPRAADLAFLEKYTLTPQPANIVHPVRPEQMLDPREQSYLGTLLGLDSTTGVQNISTNEHHS

SEQ ID NO: 15881 - protein, 422 aa, Homo Sapiens
MEFPEHGGRLLGRLRQQRELGFLCDCTVLVGDARFPAHRAVLAACSVYFHLFYRDRPAGSRDTVRLNGDIVTAPAFGRLLDFMYEGRLDLRSLPVEDVLAAASYLHMYDIVKVCKGRLQEKDRSLDPGNPAPGAEPAQPPCPWPVWTADLCPAARKAKLPPFGVKAALPPRASGPPPCQVPEESDQALDLSLKSGPRQERVHPPCVLQTPLCSQRQPGAQPLVKDERDSLSEQEESSSSRSPHSPPKPPPVPAAKGLVVGLQPLPLSGEGSRELELGAGRLASEDELGPGGPLCICPLCSKLFPSSHVLQLHLSAHFRERDSTRARLSPDGVAPTCPLCGKTFSCTYTLKRHERTHSGEKPYTCVQCGKSFQYSHNLSRHTVVHTREKPHACRWCERRFTQSGDLYRHVRKFHCGLVKSLLV

SEQ ID NO: 15882 - protein, 467 aa, Homo Sapiens
MEPGTNSFRVEFPDFSSTILQKLNQQRQQGQLCDVSIVVQGHIFRAHKAVLAASSPYFCDQVLLKNSRRIVLPDVMNPRVFENILLSSYTGRLVMPAPEIVSYLTAASFLQMWHVVDKCTEVLEGNPTVLCQKLNHGSDHQSPSSSSYNGLVESFELGSGGHTDFPKAQELRDGENEEESTKDELSSQLTEHEYLPSNSSTEHDRLSTEMASQDGEEGASDSAEFHYTRPMYSKPSIMAHKRWIHVKPERLEQACEGMDVHATYDEHQVTESINTVQTEHTVQPSGVEEDFHIGEKKVEAEFDEQADESNYDEQVDFYGSSMEEFSGERSDGNLIGHRQEAALAAGYSENIEMVTGIKEEASHLGFSATDKLYPCQCGKSFTHKSQRDRHMSMHLGLRPYGCGVCGKKFKMKHHLVGHMKIHTGIKPYECNICAKRFMWRDSFHRHVTSCTKSYEAAKAEQNTTEAN

SEQ ID NO: 15883 - protein, 570 aa, Homo Sapiens
MGVKTFTHSSSSHSQEMLGKLNMLRNDGHFCDITIRVQDKIFRAHKVVLAACSDFFRTKLVGQAEDENKNVLDLHHVTVTGFIPLLEYAYTATLSINTENIIDVLAAASYMQMFSVASTCSEFMKSSILWNTPNSQPEKGLDAGQENNSNCNFTSRDGSISPVSSECSVVERTIPVCRESRRKRKSYIVMSPESPVKCGTQTSSPQVLNSSASYSENRNQPVDSSLAFPWTFPFGIDRRIQPEKVKQAENTRTLELPGPSETGRRMADYVTCESTKTTLPLGTEEDVRVKVERLSDEEVHEEVSQPVSASQSSLSDQQTVPGSEQVQEDLLISPQSSSIGSVDEGVSEGLPTLQSTSSTNAPPDDDDRLENVQYPYQLYIAPSTSSTERPSPNGPDRPFQCPTCGVRFTRIQNLKQHMLIHSGIKPFQCDRCGKKFTRAYSLKMHRLKHEGKRCFRCQICSATFTSFGEYKHHMRVSRHIIRKPRIYECKTCGAMLTNSGNLIVHLRSLNHEASELANYFQSSDFLVPDYLNQEQEETLVQYDLGEHGFESNSSVQMPVISQYHSKGKEP

SEQ ID NO: 15884 - protein, 511 aa, Homo Sapiens
MAAAEAVHHIHLQNFSRSLLETLNGQRLGGHFCDVTVRIREASLRAHRCVLAAGSPFFQDKLLLGHSEIRVPPVVPAQTVRQLVEFLYSGSLVVAQGEALQVLTAASVLRIQTVIDECTQIIARARAPGTSAPTPLPTPVPPPLAPAQLRHRLRHLLAARPPGHPGAAHSRKQRQPARLQLPAPPTPAKAEGPDADPSLSAAPDDRGDEDDEESDDETDGEDGEGGGPGEGQAPPSFPDCAAGFLTAAADSACEEPPAPTGLADYSGAGRDFLRGAGSAEDVFPDSYVSTWHDEDGAVPEGCPTETPVQPDCILSGSRPPGVKTPGPPVALFPFHLGAPGPPAPPPSAPSGPAPAPPPAFYPTLQPEAAPSTQLGEVPAPSAAPTTAPSGTPARTPGAEPPTYECSHCRKTFSSRKNYTKHMFIHSGEKPHQCAVCWRSFSLRDYLLKHMVTHTGVRAFQCAVCAKRFTQKSSLNVHMRTHRPERAPCPACGKVFSHRALLERHLAAHPAP

SEQ ID NO: 15885 - protein, 589 aa, Homo Sapiens
MNNRKEDMEITSHYRHLLRELNEQRQHGVLCDVCVVVEGKVFKAHKNVLLGSSRYFKTLYCQVQKTSEQATVTHLDIVTAQGFKAIIDFMYSAHLALTSRNVIEVMSAASFLQMTDIVQACHDFIKAALDISIKSDASDELAEFEIGASSSSSTEALISAVMAGRSISPWLARRTSPANSSGDSAIASCHDGGSSYGKEDQEPKADGPDDVSSQPLWPGDVGYGPLRIKEEQVSPSQYGGSELPSAKDGAVQNSFSEQSAGDAWQPTGRRKNRKNKETVRHITQQVEDDSRASSPVPSFLPTSGWPFSSRDSNADLSVTEASSSDSRGERAELYAQVEEGLLGGEASYLGPPLTPEKDDALHQATAVANLRAALMSKNSLLSLKADVLGDDGSLLFEYLPRGAHSLSLNEFTVIRKKFKCPYCSFSAMHQCILKRHMRSHTGERPYPCEICGKKFTRREHMKRHTLVHSKDKKYVCKVCSRVFMSAASVGIRHGSRRHGVCTDCAGRGMAGPLDHGGGGGEGSPEALFPGDGPYLEDPEDPRGEAEELGEDDEGLAPEDALLADDKDEEDSPRPRSPPGGPDKDFAWLS

SEQ ID NO: 15886 - protein, 747 aa, Homo Sapiens
MGRLNEQRLFQPDLCDVDLVLVPQRSVFPAHKGVLAAYSQFFHSLFTQNKQLQRVELSLEALAPGGLQQILNFIYTSKLLVNAANVHEVLSAASLLQMADIAASCQELLDARSLGPPGPGTVALAQPAASCTPAAPPYYCDIKQEADTPGLPKIYAREGPDPYSVRVEDGAGTAGGTVPATIGPAQPFFKEEKEGGVEEAGGPPASLCKLEGGEELEEELGGSGTYSRREQSQIIVEVNLNNQTLHVSTGPEGKPGAGPSPATVVLGREDGLQRHSDEEEEDDEEEEEEEEEEEGGGSGREEEEEEEGGSQGEEEEEEEDGHSEQEEEEEEEEEEGPSEQDQESSEEEEGEEGEAGGKQGPRGSRSSRADPPPHSHMATRSRENARRRGTPEPEEAGRRGGKRPKPPPGVASASARGPPATDGLGAKVKLEEKQHHPCQKCPRVFNNRWYLEKHMNVTHSRMQICDQCGKRFLLESELLLHRQTDCERNIQCVTCGKAFKKLWSLHEHNKIVHGYAEKKFSCEICEKKFYTMAHVRKHMVAHTKDMPFTCETCGKSFKRSMSLKVHSLQHSGEKPFRCENCNERFQYKYQLRSHMSIHIGHKQFMCQWCGKDFNMKQYFDEHMKTHTGEKPYICEICGKSFTSRPNMKRHRRTHTGEKPYPCDVCGQRFRFSNMLKAHKEKCFRVSHTLAGDGVPAAPGLPPTQPQAHALPLLPGLPQTLPPPPHLPPPPPLFPTTASPGGRMNANN

SEQ ID NO: 15887 - protein, 688 aa, Homo Sapiens
MDGSFVQHSVRVLQELNKQREKGQYCDATLDVGGLVFKAHWSVLACCSHFFQSLYGDGSGGSVVLPAGFAEIFGLLLDFFYTGHLALTSGNRDQVLLAARELRVPEAVELCQSFKPKTSVGQAAGGQSGLGPPASQNVNSHVKEPAGLEEEEVSRTLGLVPRDQEPRGSHSPQRPQLHSPAQSEGPSSLCGKLKQALKPCPLEDKKPEDCKVPPRPLEAEGAQLQGGSNEWEVVVQVEDDGDGDYMSEPEAVLTRRKSNVIRKPCAAEPALSAGSLAAEPAENRKGTAVPVECPTCHKKFLSKYYLKVHNRKHTGEKPFECPKCGKCYFRKENLLEHEARNCMNRSEQVFTCSVCQETFRRRMELRVHMVSHTGEMPYKCSSCSQQFMQKKDLQSHMIKLHGAPKPHACPTCAKCFLSRTELQLHEAFKHRGEKLFVCEECGHRASSRNGLQMHIKAKHRNERPHVCEFCSHAFTQKANLNMHLRTHTGEKPFQCHLCGKTFRTQASLDKHNRTHTGERPFSCEFCEQRFTEKGPLLRHVASRHQEGRPHFCQICGKTFKAVEQLRVHVRRHKGVRKFECTECGYKFTRQAHLRRHMEIHDRVENYNPRQRKLRNLIIEDEKMVVVALQPPAELEVGSAEVIVESLAQGGLASQLPGQRLCAEESFTGPGVLEPSLIITAAVPEDCDT

SEQ ID NO: 15888 - protein, 765 aa, Homo Sapiens
MDPVATHSCHLLQQLHEQRIQGLLCDCMLVVKGVCFKAHKNVLAAFSQYFRSLFQNSSSQKNDVFHLDVKNVSGIGQILDFMYTSHLDLNQDNIQVMLDTAQCLQVQNVLSLCHTFLKSATVVQPPGMPCNSTLSLQSTLTPDATCVISENYPPHLLQECSADAQQNKTLDESHPHASPSVNRHHSAGEISKQAPDTSDGSCTELPFKQPNYYYKLRNFYSKQYHKHAAGPSQERVVEQPFAFSTSTDLTTVESQPCAVSHSECILESPEHLPSNFLAQPVNDSAPHPESDATCQQPVKQMRLKKAIHLKKLNFLKSQKYAEQVSEPKSDDGLTKRLESASKNTLEKASSQSAEEKESEEVVSCENFNCISETERPEDPAALEDQSQTLQSQRQYACELCGKPFKHPSNLELHKRSHTGEKPFECNICGKHFSQAGNLQTHLRRHSGEKPYICEICGKRFAASGDVQRHIIIHSGEKPHLCDICGRGFSNFSNLKEHKKTHTADKVFTCDECGKSFNMQRKLVKHRIRHTGERPYSCSACGKCFGGSGDLRRHVRTHTGEKPYTCEICNKCFTRSAVLRRHKKMHCKAGDESPDVLEELSQAIETSDLEKSQSSDSFSQDTSVTLMPVSVKLPVHPVENSVAEFDSHSGGSYCKLRSMIQPHGVSDQEKLSLDPGKLAKPQMQQTQPQAYAYSDVDTPAGGEPLQADGMAMIRSSLAALDNHGGDPLGSRASSTTYRNSEGQFFSSMTLWGLAMKTLQNENELDQ

SEQ ID NO: 15889 - protein, 677 aa, Homo Sapiens
MDFPGHFEQIFQQLNYQRLHGQLCDCVIVVGNRHFKAHRSVLAACSTHFRALFSVAEGDQTMNMIQLDSEVVTAEAFAALIDMMYTSTLMLGESNVMDVLLAASHLHLNSVVKACKHYLTTRTLPMSPPSERVQEQSARMQRSFMLQQLGLSIVSSALNSSQNGEEQPAPMSSSMRSNLDQRTPFPMRRLHKRKQSAEERARQRLRPSIDESAISDVTPENGPSGVHSREEFFSPDSLKIVDNPKADGMTDNQEDSAIMFDQSFGTQEDAQVPSQSDNSAGNMAQLSMASRATQVETSFDQEAAPEKSSFQCENPEVGLGEKEHMRVVVKSEPLSSPEPQDEVSDVTSQAEGSESVEVEGVVVSAEKIDLSPESSDRSFSDPQSSTDRVGDIHILEVTNNLEHKSTFSISNFLNKSRGNNFTANQNNDDNIPNTTSDCRLESEAPYLLSPEAGPAGGPSSAPGSHVENPFSEPADSHFVRPMQEVMGLPCVQTSGYQGGEQFGMDFSRSGLGLHSSFSRVMIGSPRGGASNFPYYRRIAPKMPVVTSVRSSQIPENSTSSQLMMNGATSSFENGHPSQPGPPQLTRASADVLSKCKKALSEHNVLVVEGARKYACKICCKTFLTLTDCKKHIRVHTGEKPYACLKCGKRFSQSSHLYKHSKTTCLRWQSSNLPSTLL

SEQ ID NO: 15890 - protein, 424 aa, Homo Sapiens
MAAESDVLHFQFEQQGDVVLQKMNLLRQQNLFCDVSIYINDTEFQGHKVILAACSTFMRDQFLLTQSKHVRITILQSAEVGRKLLLSCYTGALEVKRKELLKYLTAASYLQMVHIVEKCTEALSKYLEIDLSMKNNNQHTDLCQSSDPDVKNEDENSDKDCEIIEISEDSPVNIDFHVKEEESNALQSTVESLTSERKEMKSPELSTVDIGFKDNEICILHVESISTAGVENGQFSQPCTSSKASMYFSETQHSLINSTVESRVAEVPGNQDQGLFCENTEGSYGTVSEIQNLEEGYSLRHQCPRCPRGFLHVENYLRHLKMHKLFLCLQCGKTFTQKKNLNRHIRGHMGIRPFQCTVCLKTFTAKSTLQDHLNIHSGDRPYKCHCCDMDFKHKSALKKHLTSVHGRSSGEKLSRPDLKRQSLL

SEQ ID NO: 15891 - protein, 584 aa, Homo Sapiens
MAGGVDGPIGIPFPDHSSDILSGLNEQRTQGLLCDVVILVEGREFPTHRSVLAACSQYFKKLFTSGAVVDQQNVYEIDFVSAEALTALMDFAYTATLTVSTANVGDILSAARLLEIPAVSHVCADLLDRQILAADAGADAGQLDLVDQIDQRNLLRAKEYLEFFQSNPMNSLPPAAAAAAASFPWSAFGASDDDLDATKEAVAAAVAAVAAGDCNGLDFYGPGPPAERPPTGDGDEGDSNPGLWPERDEDAPTGGLFPPPVAPPAATQNGHYGRGGEEEAASLSEAAPEPGDSPGFLSGAAEGEDGDGPDVDGLAASTLLQQMMSSVGRAGAAAGDSDEESRADDKGVMDYYLKYFSGAHDGDVYPAWSQKVEKKIRAKAFQKCPICEKVIQGAGKLPRHIRTHTGEKPYECNICKVRFTRQDKLKVHMRKHTGEKPYLCQQCGAAFAHNYDLKNHMRVHTGLRPYQCDSCCKTFVRSDHLHRHLKKDGCNGVPSRRGRKPRVRGGAPDPSPGATATPGAPAQPSSPDARRNGQEKHFKDEDEDEDVASPDGLGRLNVAGAGGGGDSGGGPGAATDGNFTAGLA

SEQ ID NO: 15892 - protein, 539 aa, Homo Sapiens; identical to SEQ ID NO: 15784

SEQ ID NO: 15893 - protein, 619 aa, Homo Sapiens
MANDIDELIGIPFPNHSSEVLCSLNEQRHDGLLCDVLLVVQEQEYRTHRSVLAACSKYFKKLFTAGTLASQPYVYEIDFVQPEALAAILEFAYTSTLTITAGNVKHILNAARMLEIQCIVNVCLEIMEPGGDGGEEDDKEDDDDDEDDDDEEDEEEEEEEEEDDDDDTEDFADQENLPDPQDISCHQSPSKTDHLTEKAYSDTPRDFPDSFQAGSPGHLGVIRDFSIESLLRENLYPKANIPDRRPSLSPFAPDFFPHLWPGDFGAFAQLPEQPMDSGPLDLVIKNRKIKEEEKEELPPPPPPPFPNDFFKDMFPDLPGGPLGPIKAENDYGAYLNFLSATHLGGLFPPWPLVEERKLKPKASQQCPICHKVIMGAGKLPRHMRTHTGEKPYMCTICEVRFTRQDKLKIHMRKHTGERPYLCIHCNAKFVHNYDLKNHMRIHTGVRPYQCEFCYKSFTRSDHLHRHIKRQSCRMARPRRGRKPAAWRAASLLFGPGGPAPDKAAFVMPPALGEVGGHLGGAAVCLPGPSPAKHFLAAPKGALSLQELERQFEETQMKLFGRAQLEAERNAGGLLAFALAENVAAARPYFPLPDPWAAGLAGLPGLAGLNHVASMSEANN

SEQ ID NO: 15894 - protein, 441 aa, Homo Sapiens
MEISSHQSHLLQQLNEQRRQDVFCDCSILVEGKVFKAHRNVLFASSGYFKMLLSQNSKETSQPTTATFQAFSPDTFTVILDFVYSGKLSLTGQNVIEVMSAASFLQMTDVISVCKTFIKSSLDISEKEKDRYFSLSDKDANSNGVERSSFYSGGWQEGSSSPRSHLSPEQGTGIISGKSWNKYNYHPASQKNTQQPLAKHEPRKESIKKTKHLRLSQPSEVTHYKSSKREVRTSDSSSHVSQSEEQAQIDAEMDSTPVGYQYGQGSDVTSKSFPDDLPRMRFKCPYCTHVVKRKADLKRHLRCHTGERPYPCQACGKRFSRLDHLSSHFRTIHQACKLICRKCKRHVTDLTGQVVQEGTRRYRLCNECLAEFGIDSLPIDLEAEQHLMSPSDGDKDSRWHLSEDENRSYVEIVEDGSGDLVIQQVDDSEEEEEKEIKPNIR

SEQ ID NO: 15895 - protein, 473 aa, Homo Sapiens
METPTPLPPVPASPTCNPAPRTIQIEFPQHSSSLLESLNRHRLEGKFCDVSLLVQGRELRAHKAVLAAASPYFHDKLLLGDAPRLTLPSVIEADAFEGLLQLIYSGRLRLPLDALPAHLLVASGLQMWQVVDQCSEILRELETSGGGISARGGNSYHALLSTTSSTGGWCIRSSPFQTPVQSSASTESPASTESPVGGEGSELGEVLQIQVEEEEEEEEDDDDEDQGSATLSQTPQPQRVSGVFPRPHGPHPLPMTATPRKLPEGESAPLELPAPPALPPKIFYIKQEPFEPKEEISGSGTQPGGAKEETKVFSGGDTEGNGELGFLLPSGPGPTSGGGGPSWKPVDLHGNEILSGGGGPGGAGQAVHGPVKLGGTPPADGKRFGCLCGKRFAVKPKRDRHIMLTFSLRPFGCGICNKRFKLKHHLTEHMKTHAGALHACPHCGRRFRVHACFLRHRDLCKGQGWATAHWTYK

SEQ ID NO: 15896 - protein, 434 aa, Homo Sapiens
MPDRDSYANGTGSSGGGPGGGGSEEASGAGVGSGGASSDAICRDFLRNVCKRGKRCRYRHPDMSEVSNLGVSKNEFIFCHDFQNKECSRPNCRFIHGSKEDEDGYKKTGELPPRLRQKVAAGLGLSPADLPNGKEEVPICRDFLKGDCQRGAKCKFRHLQRDFEFDARGGGGTGGGSTGSVLPGRRHDLYDIYDLPDRGFEDHEPGPKRRRGGCCPPDGPHFESYEYSLAPPRGVECRLLEEENAMLRKRVEELKKQVSNLLATNEVLLEQNAQFRNQAKVITLSSTAPATEQTLAPTVGTVATFNHGIAQTHTTLSSQALQPRPVSQQELVAPAGAPAAPPTNAAPPAAPPPPPPHLTPEITPLSAALAQTIAQGMAPPPVSMAPVAVSVAPVAPVAVSMAQPLAGITMSHTTTPMVTYPIASQSMRITAMPH

SEQ ID NO: 15897 - protein, 810 aa, Homo Sapiens
MPNQGEDCYFFFYSTCTKGDSCPFRHCEAAIGNETVCTLWQEGRCFRQVCRFRHMEIDKKRSEIPCYWENQPTGCQKLNCAFHHNRGRYVDGLFLPPSKTVLPTVPESPEEEVKASQLSVQQNKLSVQSNPSPQLRSVMKVESSENVPSPTHPPVVINAADDDEDDDDQFSEEGDETKTPTLQPTPEVHNGLRVTSVRKPAVNIKQGECLNFGIKTLEEIKSKKMKEKSKKQGEGSSGVSSLLLHPEPVPGPEKENVRTVVRTVTLSTKQGEEPLVRLSLTERLGKRKFSAGGDSDPPLKRSLAQRLGKKVEAPETNIDKTPKKAQVSKSLKERLGMSADPDNEDATDKVNKVGEIHVKTLEEILLERASQKRGELQTKLKTEGPSKTDDSTSGARSSSTIRIKTFSEVLAEKKHRQQEAERQKSKKDTTCIKLKIDSEIKKTVVLPPIVASRGQSEEPAGKTKSMQEVHIKTLEEIKLEKALRVQQSSESSTSSPSQHEATPGARRLLRITKRTGMKEEKNLQEGNEVDSQSSIRTEAKEASGETTGVDITKIQVKRCETMREKHMQKQQEREKSVLTPLRGDVASCNTQVAEKPVLTAVPGITRHLTKRLPTKSSQKVEVETSGIGDSLLNVKCAAQTLEKRGKAKPKVNVKPSVVKVVSSPKLAPKRKAVEMHAAVIAAVKPLSSSSVLQEPPAKKAAVAVVPLVSEDKSVTVPEAENPRDSLVLPPTQSSSDSSPPEVSGPSSSQMSMKTRRLSSASTGKPPLSVEDDFEKLIWEISGGKLEAEIDLDPGKDEDDLLLELSEMIDS

SEQ ID NO: 15898 - protein, 599 aa, Homo Sapiens
MSGPCGEKPVLEASPTMSLWEFEDSHSRQGTPRPGQELAAEEASALELQMKVDFFRKLGYSSTEIHSVLQKLGVQADTNTVLGELVKHGTATERERQTSPDPCPQLPLVPRGGGTPKAPNLEPPLPEEEKEGSDLRPVVIDGSNVAMSHGNKEVFSCRGILLAVNWFLERGHTDITVFVPSWRKEQPRPDVPITDQHILRELEKKKILVFTPSRRVGGKRVVCYDDRFIVKLAYESDGIVVSNDTYRDLQGERQEWKRFIEERLLMYSFVNDKFMPPDDPLGRHGPSLDNFLRKKPLTLEHRKQPCPYGRKCTYGIKCRFFHPERPSCPQRSVADELRANALLSPPRAPSKDKNGRRPSPSSQSSSLLTESEQCSLDGKKLGAQASPGSRQEGLTQTYAPSGRSLAPSGGSGSSFGPTDWLPQTLDSLPYVSQDCLDSGIGSLESQMSELWGVRGGGPGEPGPPRAPYTGYSPYGSELPATAAFSAFGRAMGAGHFSVPADYPPAPPAFPPREYWSEPYPLPPPTSVLQEPPVQSPGAGRSPWGRAGSLAKEQASVYTKLCGVFPPHLVEAVMGRFPQLLDPQQLAAEILSYKSQHPSE

SEQ ID NO: 15899 - protein, 836 aa, Homo Sapiens
MTATAEVETPKMEKSASKEEKQQPKQDSTEQGNADSEEWMSSESDPEQISLKSSDNSKSCQPRDGQLKKKEMHSKPHRQLCRSPCLDRPSFSQSSILQDGKLDLEKEYQAKMEFALKLGYAEEQIQSVLNKLGPESLINDVLAELVRLGNKGDSEGQINLSLLVPRGPSSREIASPELSLEDEIDNSDNLRPVVIDGSNVAMSHGNKEEFSCRGIQLAVDWFLDKGHKDITVFVPAWRKEQSRPDAPITDQDILRKLEKEKILVFTPSRRVQGRRVVCYDDRFIVKLAFDSDGIIVSNDNYRDLQVEKPEWKKFIEERLLMYSFVNDKFMPPDDPLGRHGPSLENFLRKRPIVPEHKKQPCPYGKKCTYGHKCKYYHPERANQPQRSVADELRISAKLSTVKTMSEGTLAKCGTGMSSAKGEITSEVKRVAPKRQSDPSIRSVAMEPEEWLSIARKPEASSVPSLVTALSVPTIPPPKSHAVGALNTRSASSPVPGSSHFPHQKASLEHMASMQYPPILVTNSHGTPISYAEQYPKFESMGDHGYYSMLGDFSKLNINSMHNREYYMAEVDRGVYARNPNLCSDSRVSHTRNDNYSSYNNVYLAVADTHPEGNLKLHRSASQNRLQPFPHGYHEALTRVQSYGPEDSKQGPHKQSVPHLALHAQHPSTGTRSSCPADYPMPPNIHPGATPQPGRALVMTRMDSISDSRLYESNPVRQRRPPLCREQHASWDPLPCTTDSYGYHSYPLSNSLMQPCYEPVMVRSVPEKMEQLWRNPWVGMCNDSREHMIPEHQYQTYKNLCNIFPSNIVLAVMEKNPHTADAQQLAALIVAKLRAAR

SEQ ID NO: 15900 - protein, 1668 aa, Homo Sapiens
MSKIRRKVTVENTKTISDSTSRRPSVFERLGPSTGSTAETQCRNWLKTGNCLYGNTCRFVHGPSPRGKGYSSNYRRSPERPTGDLRERMKNKRQDVDTEPQKRNTEESSSPVRKESSRGRHREKEDIKITKERTPESEEENVEWETNRDDSDNGDINYDYVHELSLEMKRQKIQRELMKLEQENMEKREEIIIKKEVSPEVVRSKLSPSPSLRKSSKSPKRKSSPKSSSASKKDRKTSAVSSPLLDQQRNSKTNQSKKKGPRTPSPPPPIPEDIALGKKYKEKYKVKDRIEEKTRDGKDRGRDFERQREKRDKPRSTSPAGQHHSPISSRHHSSSSQSGSSIQRHSPSPRRKRTPSPSYQRTLTPPLRRSASPYPSHSLSSPQRKQSPPRHRSPMREKGRHDHERTSQSHDRRHERREDTRGKRDREKDSREEREYEQDQSSSRDHRDDREPRDGRDRRDARDTRDRRELRDSRDMRDSREMRDYSRDTKESRDPRDSRSTRDAHDYRDREGRDTHRKEDTYPEESRSYGRNHLREESSRTEIRNESRNESRSEIRNDRMGRSRGRVPELPEKGSRGSRGSQIDSHSSNSNYHDSWETRSSYPERDRYPERDNRDQARDSSFERRHGERDRRDNRERDQRPSSPIRHQGRNDELERDERREERRVDRVDDRRDERARERDRERERDRERERERERERDREREKERELERERAREREREREKERDRERDRDRDHDRERERERERDREKEREREREERERERERERERERERERERERARERDKERERQRDWEDKDKGRDDRREKREEIREDRNPRDGHDERKSKKRYRNEGSPSPRQSPKRRREHSPDSDAYNSGDDKNEKHRLLSQVVRPQESRSLSPSHLTEDRQGRWKEEDRKPERKESSRRYEEQELKEKVSSVDKQREQTEILESSRMRAQDIIGHHQSEDRETSDRAHDENKKKAKIQKKPIKKKKEDDVGIERGNIETTSEDGQVFSPKKGQKKKSIEKKRKKSKGDSDISDEEAAQQSKKKRGPRTPPITTKEELVEMCNGKNGILEDSQKKEDTAFSDWSDEDVPDRTEVTEAEHTATATTPGSTPSPLSSLLPPPPPVATATATTVPATLAATTAAAATSFSTSAITISTSATPTNTTNNTFANEDSHRKCHRTRVEKVETPHVTIEDAQHRKPMDQKRSSSLGSNRSNRSHTSGRLRSPSNDSAHRSGDDQSGRKRVLHSGSRDREKTKSLEITGERKSRIDQLKRGEPSRSTSSDRQDSRSHSSRRSSPESDRQVHSRSGSFDSRDRLQERDRYEHDRERERERRDTRQREWDRDADKDWPRNRDRDRLRERERERERDKRRDLDRERERLISDSVERDRDRDRDRTFESSQIESVKRCEAKLEGEHERDLESTSRDSLALDKERMDKDLGSVQGFEETNKSERTESLEGDDESKLDDAHSLGSGAGEGYEPISDDELDEILAGDAEKREDQQDEEKMPDPLDVIDVDWSGLMPKHPKEPREPGAALLKFTPGAVMLRVGISKKLAGSELFAKVKETCQRLLEKPKDADNLFEHELGALNMAALLRKEERASLLSNLGPCCKALCFRRDSAIRKQLVKNEKGTIKQAYTSAPMVDNELLRLSLRLFKRKTTCHAPGHEKTEDNKLSQSSIQQELCVS

SEQ ID NO: 15901 - protein, 736 aa, Homo Sapiens
MEIGTEISRKIRSAIKGKLQELGAYVDEELPDYIMVMVANKKSQDQMTEDLSLFLGNNTIRFTVWLHGVLDKLRSVTTEPSSLKSSDTNIFDSNVPSNKSNFSRGDERRHEAAVPPLAIPSARPEKRDSRVSTSSQESKTTNVRQTYDDGAATRLMSTVKPLREPAPSEDVIDIKPEPDDLIDEDLNFVQENPLSQKKPTVTLTYGSSRPSIEIYRPPASRNADSGVHLNRLQFQQQQNSIHAAKQLDMQSSWVYETGRLCEPEVLNSLEETYSPFFRNNSEKMSMEDENFRKRKLPVVSSVVKVKKFNHDGEEEEEDDDYGSRTGSISSSVSVPAKPERRPSLPPSKQANKNLILKAISEAQESVTKTTNYSTVPQKQTLPVAPRTRTSQEELLAEVVQGQSRTPRISPPIKEEETKGDSVEKNQGTQQRQLLSRLQIDPVMAETLQMSQDYYDMESMVHADTRSFILKKPKLSEEVVVAPNQESGMKTADSLRVLSGHLMQTRDLVQPDKPASPKFIVTLDGVPSPPGYMSDQEEDMCFEGMKPVNQTAASNKGLRGLLHPQQLHLLSRQLEDPNGSFSNAEMSELSVAQKPEKLLERCKYWPACKNGDECAYHHPISPCKAFPNCKFAEKCLFVHPNCKYDAKCTKPDCPFTHVSRRIPVLSPKPAVAPPAPPSSSQLCRYFPACKKMECPFYHPKHCRFNTQCTRPDCTFYHPTINVPPRHALKWIRPQTSE

SEQ ID NO: 15902 - protein, 426 aa, Homo Sapiens
MPPKKQAQAGGSKKAEQKKKEKIIEDKTFGLKNKKGAKQQKFIKAVTHQVKFGQQNPRQVAQSEAEKKLKKDDKKKELQELNELFKPVVAAQKISKGADPKSVVCAFFKQGQCTKGDKCKFSHDLTLERKCEKRSVYIDARDEELEKDTMDNWDEKKLEEVVNKKHGEAEKKKPKTQIVCKHFLEAIENNKYGWFWVCPGGGDICMYRHALPPGFVLKKDKKKEEKEDEISLEDLIERERSALGPNVTKITLESFLAWKKRKRQEKIDKLEQDMERRKADFKAGKALVISGREVFEFRPELVNDDDEEADDTRYTQGTGGDEVDDSVSVNDIDLSLYIPRDVDETGITVASLERFSTYTSDKDENKLSEASGGRAENGERSDLEEDNEREGTENGAIDAVPVDENLFTGEDLDELEEELNTLDLEE

SEQ ID NO: 15903 - protein, 953 aa, Homo Sapiens
MDVAESPERDPHSPEDEEQPQGLSDDDILRDSGSDQDLDGAGVRASDLEDEESAARGPSQEEEDNHSDEEDRASEPKSQDQDSEVNELSRGPTSSPCEEEGDEGEEDRTSDLRDEASSVTRELDEHELDYDEEVPEEPAPAVQEDEAEKAGAEDDEEKGEGTPREEGKAGVQSVGEKESLEAAKEKKKEDDDGEIDDGEIDDDDLEEGEVKDPSDRKVRPRPTCRFFMKGNCTWGMNCRFIHPGVNDKGNYSLITKADPFPPNGAPPLGPHPLMPANPWGGPVVDEILPPPPPEPPTESAWERGLRHAKEVLKKATIRKEQEPDFEEKRFTVTIGEDEREFDKENEVFRDWNSRIPRDVRDTVLEPYADPYYDYEIERFWRGGQYENFRVQYTETEPYHNYRERERERERENRQRERERERERDRERERRQRERERERERERDKERQRRKEEWERERAKRDEKDRQHRDRDREKEREKEKGKPKPRSPQPPSRQAEPPKKEAATTGPQVKRADEWKDPWRRSKSPKKKLGVSVSPSRARRRRKTSASSASASNSSRSSSRSSSYSGSGSSRSRSRSSSYSSYSSRSSRHSSFSGSRSRSRSFSSSPSPSPTPSPHRPSIRTKGEPAPPPGKAGEKSVKKPAPPPAPPQATKTTAPVPEPTKPGDPREARRKERPARTPPRRRTLSGSGSGSGSSYSGSSSRSRSLSVSSVSSVSSATSSSSSAHSVDSEDMYADLASPVSSASSRSPAPAQTRKEKGKSKKEDGVKEEKRKRDSSTQPPKSAKPPAGGKSSQQPSTPQQAPPGQPQQGTFVAHKEIKLTLLNKAADKGSRKRYEPSDKDRQSPPPAKRPNTSPDRGSRDRKSGGRLGSPKPERQRGQNSKAPAAPADRKRQLSPQSKSSSKVTSVPGKASDPGAASTKSGKASTLSRREELLKQLKAVEDAIARKRAKIPGKA

SEQ ID NO: 15904 - protein, 948 aa, Homo Sapiens
MEEKEILRRQIRLLQGLIDDYKTLHGNAPAPGTPAASGWQPPTYHSGRAFSARYPRPSRRGYSSHHGPSWRKKYSLVNRPPGPSDPPADHAVRPLHGARGGQPPVPQQHVLERQVQLSQGQNVVIKVKPPSKSGSASASGAQRGSLEEFEETPWSDQRPREGEGEPPRGQLQPSRPTRARGTCSVEDPLLVCQKEPGKPRMVKSVGSVGDSPREPRRTVSESVIAVKASFPSSALPPRTGVALGRKLGSHSVASCAPQLLGDRRVDAGHTDQPVPSGSVGGPARPASGPRQAREASLVVTCRTNKFRKNNYKWVAASSKSPRVARRALSPRVAAENVCKASAGMANKVEKPQLIADPEPKPRKPATSSKPGSAPSKYKWKASSPSASSSSSFRWQSEASSKDHASQLSPVLSRSPSGDRPAVGHSGLKPLSGETPLSAYKVKSRTKIIRRRSSTSLPGDKKSGTSPAATAKSHLSLRRRQALRGKSSPVLKKTPNKGLVQVTTHRLCRLPPSRAHLPTKEASSLHAVRTAPTSKVIKTRYRIVKKTPASPLSAPPFPLSLPSWRARRLSLSRSLVLNRLRPVASGGGKAQPGSPWWRSKGYRCIGGVLYKVSANKLSKTSGQPSDAGSRPLLRTGRLDPAGSCSRSLASRAVQRSLAIIRQARQRREKRKEYCMYYNRFGRCNRGERCPYIHDPEKVAVCTRFVRGTCKKTDGTCPFSHHVSKEKMPVCSYFLKGICSNSNCPYSHVYVSRKAEVCSDFLKGYCPLGAKCKKKHTLLCPDFARRGACPRGAQCQLLHRTQKRHSRRAATSPAPGPSDATARSRVSASHGPRKPSASQRPTRQTPSSAALTAAAVAAPPHCPGGSASPSSSKASSSSSSSSSPPASLDHEAPSLQEAALAAACSNRLCKLPSFISLQSSPSPGAQPRVRAPRAPLTKDSGKPLHIKPRL

SEQ ID NO: 15905 - protein, 1303 aa, Homo Sapiens
MEAAPGTPPPPPSESPPPPSPPPPSTPSPPPCSPDARPATPHLLHHRLPLPDDREDGELEEGELEDDGAEETQDTSGGPERSRKEKGEKHHSDSDEEKSHRRLKRKRKKEREKEKRRSKKRRKSKHKRHASSSDDFSDFSDDSDFSPSEKGHRKYREYSPPYAPSHQQYPPSHATPLPKKAYSKMDSKSYGMYEDYENEQYGEYEGDEEEDMGKEDYDDFTKELNQYRRAKEGSSRGRGSRGRGRGYRGRGSRGGSRGRGMGRGSRGRGRGSMGGDHPEDEEDFYEEEMDYGESEEPMGDDDYDEYSKELNQYRRSKDSRGRGLSRGRGRGSRGRGKGMGRGRGRGGSRGGMNKGGMNDDEDFYDEDMGDGGGGSYRSRDHDKPHQQSDKKGKVICKYFVEGRCTWGDHCNFSHDIELPKKRELCKFYITGFCARAENCPYMHGDFPCKLYHTTGNCINGDDCMFSHDPLTEETRELLDKMLADDAEAGAEDEKEVEELKKQGINPLPKPPPGVGLLPTPPRPPGPQAPTSPNGRPMQGGPPPPPPPPPPPPGPPQMPMPVHEPLSPQQLQQQDMYNKKIPSLFEIVVRPTGQLAEKLGVRFPGPGGPPGPMGPGPNMGPPGPMGGPMHPDMHPDMHPDMHPDMHADMHADMPMGPGMNPGPPMGPGGPPMMPYGPGDSPHSGMMPPIPPAQNFYENFYQQQEGMEMEPGLLGDAEDYGHYEELPGEPGEHLFPEHPLEPDSFSEGGPPGRPKPGAGVPDFLPSAQRALYLRIQQKQQEEEERARRLAESSKQDRENEEGDTGNWYSSDEDEGGSSVTSILKTLRQQTSSRPPASVGELSSSGLGDPRLQKGHPTGSRLADPRLSRDPRLTRHVEASGGSGPGDSGPSDPRLARALPTSKPEGSLHSSPVGPSSSKGSGPPPTEEEEGERALREKAVNIPLDPLPGHPLRDPRSQLQQFSHIKKDVTLSKPSFARTVLWNPEDLIPLPIPKQDAVPPVPAALQSMPTLDPRLHRAATAGPPNARQRPGASTDSSTQGANLPDFELLSRILKTVNATGSSAAPGSSDKPSDPRVRKAPTDPRLQKPTDSTASSRAAKPGPAEAPSPTASPSGDASPPATAPYDPRVLAAGGLGQGGGGGQSSVLSGISLYDPRTPNAGGKATEPAADTGAQPKGAEGNGKSSASKAKEPPFVRKSALEQPETGKAGADGGTPTDRYNSYNRPRPKAAAAPAATTATPPPEGAPPQPGVHNLPVPTLFGTVKQTPKTGSGSPFAGNSPAREGEQDAASLKDVFKGFDPTASPFCQ

SEQ ID NO: 15906 - protein, 1189 aa, Homo Sapiens
MTDSEHAGHDREDGELEDGEIDDAGFEEIQEKEAKENEKQKSEKAYRKSRKKHKKEREKKKSKRRKREKHKHNSPSSDDSSDYSLDSDVEHTESSHKKRTGFYRDYDIPFTQRGHISGSYITSKKGQHNKKFKSKEYDEYSTYSDDNFGNYSDDNFGNYGQETEEDFANQLKQYRQAKETSNIALGSSFSKESGKKQRMKGVQQGIEQRVKSFNVGRGRGLPKKIKRKERGGRTNKGPNVFSVSDDFQEYNKPGKKWKVMTQEFINQHTVEHKGKQICKYFLEGRCIKGDQCKFDHDAELEKRKEICKFYLQGYCTKGENCIYMHNEFPCKFYHSGAKCYQGDNCKFSHDDLTKETKKLLDKVLNTDEELINEDERELEELRKRGITPLPKPPPGVGLLPTPPEHFPFSDPEDDFQTDFSDDFRKIPSLFEIVVKPTVDLAHKIGRKPPAFYTSASPPGPQFQGSSPHPQHIYSSGSSPGPGPNMSQGHSSPVMHPGSPGHHPCAGPPGLPVPQSPPLPPGPPEIVGPQNQAGVLVQPDTSLTPPSMGGAYHSPGFPGHVMKVPRENHCSPGSSYQQSPGEMQLNTNYESLQNPAEFYDNYYAQHSIHNFQPPNNSGDGMWHGEFAQQQPPVVQDSPNHGSGSDGSSTRTGHGPLPVPGLLPAVQRALFVRLTQRYQEDEEQTSTQPHRAPSKEEDDTVNWYSSSEEEEGSSVKSILKTLQKQTETLRNQQQPSTELSTPTDPRLAKEKSKGNQVVDPRLRTIPRQDIRKPSESAPLDLRLAWDPRKLRGNGSGHIGSSVGGAKFDLHHANAGTNVKHKRGDDDDEDTERELREKAFLIPLDASPGIMLQDPRSQLRQFSHIKMDITLTKPNFAKHIVWAPEDLLPVPLPKPDPVSSINLPLPPLIADQRLNRLWNTKSDLHQNTVSIDPKLAAKAKINTTNREGYLEQFGDSHGSGAKLGDPRLQKNFDPRLHRLPNTESHQVVMKDSHASKGAPHLPRSNPGSSQPSGAGTSNSGSGALPPYAPKLSSSAGLPLGTSTSVLSGISLYDPRDHGSSSTSELATASSGENSKNQKKSGGLKSSDKTEPSPGEAILPQKPSPNVGVTLEGPADPQADVPRSSGKVQVPAVHSLPVQALTGLIRPQYSDPRQARQPGQGSPTPDNDPGRETDDKSLKEVFKTFDPTASPFC

SEQ ID NO: 15907 - protein, 971 aa, Homo Sapiens
MSNVSEERRKRQQNIKEGLQFIQSPLSYPGTQEQYAVYLRALVRNLFNEGNDVYREHDWNNSISQYTEALNIADYAKSEEILIPKEIIEKLYINRIACYSNMGFHDKVLEDCNIVLSLNASNCKALYRKSKALSDLGRYKKAYDAVAKCSLAVPQDEHVIKLTQELAQKLGFKIRKAYVRAELSLKSVPGDGATKALNHSVEDIEPDLLTPRQEAVPVVSLPAPSFSHEVGSELASVPVMPLTSILPLQVEESALPSAVLANGGKMPFTMPEAFLDDGDMVLGDELDDLLDSAPETNETVMPSALVRGPLQTASVSPSMPFSASLLGTLPIGARYAPPPSFSEFYPPLTSSLEDFCSSLNSFSMSESKRDLSTSTSREGTPLNNSNSSLLLMNGPGSLFASENFLGISSQPRNDFGNFFGSAVTKPSSSVTPRHPLEGTHELRQACQICFVKSGPKLMDFTYHANIDHKCKKDILIGRIKNVEDKSWKKIRPRPTKTNYEGPYYICKDVAAEEECRYSGHCTFAYCQEEIDVWTLERKGAFSREAFFGGNGKINLTVFKLLQEHLGEFIFLCEKCFDHKPRMISKRNKDNSTACSHPVTKHEFEDNKCLVHILRETTVKYSKIRSFHGQCQLDLCRHEVRYGCLREDECFYAHSLVELKVWIMQNETGISHDAIAQESKRYWQNLEANVPGAQVLGNQIMPGFLNMKIKFVCAQCLRNGQVIEPDKNRKYCSAKARHSWTKDRRAMRVMSIERKKWMNIRPLPTKKQMPLQFDLCNHIASGKKCQYVGNCSFAHSPEEREVWTYMKENGIQDMEQFYELWLKSQKNEKSEDIASQSNKENGKQIHMPTDYAEVTVDFHCWMCGKNCNSEKQWQGHISSEKHKEKVFHTEDDQYCWQHRFPTGYFSICDRYMNGTCPEGNSCKFAHGNAELHEWEERRDALKMKLNKARKDHLIGPNDNDFGKYSFLFKDLN

SEQ ID NO: 15908 - protein, 993 aa, Homo Sapiens
MERQKRKADIEKGLQFIQSTLPLKQEEYEAFLLKLVQNLFAEGNDLFREKDYKQALVQYMEGLNVADYAASDQVALPRELLCKLHVNRAACYFTMGLYEKALEDSEKALGLDSESIRALFRKARALNELGRHKEAYECSSRCSLALPHDESVTQLGQELAQKLGLRVRKAYKRPQELETFSLLSNGTAAGVADQGTSNGLGSIDDIETGNVPDTREQVEIGAPRDCYVDPRGSPALLPSTPTMPLFPHVLDLLAPLDSSRTLPSTDSLDDFSDGDVFGPELDTLLDSLSLVQGGLSGSGVPSELPQLIPVFPGGTPLLPPVVGGSIPVSSPLPPASFGLVMDPSKKLAASVLDALDPPGPTLDPLDLLPYSETRLDALDSFGSTRGSLDKPDSFMEETNSQDHRPPSGAQKPAPSPEPCMPNTALLIKNPLAATHEFKQACQLCYPKTGPRAGDYTYREGLEHKCKRDILLGRLRSSEDQTWKRIRPRPTKTSFVGSYYLCKDMINKQDCKYGDNCTFAYHQEEIDVWTEERKGTLNRDLLFDPLGGVKRGSLTIAKLLKEHQGIFTFLCEICFDSKPRIISKGTKDSPSVCSNLAAKHSFYNNKCLVHIVRSTSLKYSKIRQFQEHFQFDVCRHEVRYGCLREDSCHFAHSFIELKVWLLQQYSGMTHEDIVQESKKYWQQMEAHAGKASSSMGAPRTHGPSTFDLQMKFVCGQCWRNGQVVEPDKDLKYCSAKARHCWTKERRVLLVMSKAKRKWVSVRPLPSIRNFPQQYDLCIHAQNGRKCQYVGNCSFAHSPEERDMWTFMKENKILDMQQTYDMWLKKHNPGKPGEGTPISSREGEKQIQMPTDYADIMMGYHCWLCGKNSNSKKQWQQHIQSEKHKEKVFTSDSDASGWAFRFPMGEFRLCDRLQKGKACPDGDKCRCAHGQEELNEWLDRREVLKQKLAKARKDMLLCPRDDDFGKYNFLLQEDGDLAGATPEAPAAAATATTGE

SEQ ID NO: 15909 - protein, 291 aa, Homo Sapiens [sequence omitted]

SEQ ID NO: 15910 - protein, 1644 aa, Homo Sapiens
MEESKTLKSENHEPKKNVICEESKAVQVIGNQTLKARNDKSVKEIENSSPNRNSSKKNKQNDICIEKTEVKSCKVNAANLPGPKDLGLVLRDQSHCKAKKFPNSPVKAEKATISQAKSEKATSLQAKAEKSPKSPNSVKAEKASSYQMKSEKVPSSPAEAEKGPSLLLKDMRQKTELQQIGKKIPSSFTSVDKVNIEAVGGEKCALQNSPRSQKQQTCTDNTGDSDDSASGIEDVSDDLSKMKNDESNKENSSEMDYLENATVIDESALTPEQRLGLKQAEERLERDHIFRLEKRSPEYTNCRYLCKLCLIHIENIQGAHKHIKEKRHKKNILEKQEESELRSLPPPSPAHLAALSVAVIELAKEHGITDDDLRVRQEIVEEMSKVITTFLPECSLRLYGSSLTRFALKSSDVNIDIKFPPKMNHPDLLIKVLGILKKNVLYVDVESDFHAKVPVVVCRDRKSGLLCRVSAGNDMACLTTDLLTALGKIEPVFIPLVLAFRYWAKLCYIDSQTDGGIPSYCFALMVMFFLQQRKPPLLPCLLGSWIEGFDPKRMDDFQLKGIVEEKFVKWECNSSSATEKNSIAEENKAKADQPKDDTKKTETDNQSNAMKEKHGKSPLALETPNRVSLGQLWLELLKFYTLDFALEEYVICVRIQDILTRENKNWPKRRIAIEDPFSVKRNVARSLNSQLVYEYVVERFRAAYRYFACPQTKGGNKSTVDFKKREKGKISNKKPVKSNNMATNGCILLGETTEKINAEREQPVQCDEMDCTSQRCIIDNNNLLVNELDFADHGQDSSSLSTSKSSEIEPKLDKKQDDLAPSETCLKKELSQCNCIDLSKSPDPDKSTGTDCRSNLETESSHQSVCTDTSATSCNCKATEDASDLNDDDNLPTQELYYVFDKFILTSGKPPTIVCSICKKDGHSKNDCPEDFRKIDLKPLPPMTNRFREILDLVCKRCFDELSPPCSEQHNREQILIGLEKFIQKEYDEKARLCLFGSSKNGFGFRDSDLDICMTLEGHENAEKLNCKEIIENLAKILKRHPGLRNILPITTAKVPIVKFEHRRSGLEGDISLYNTLAQHNTRMLATYAAIDPRVQYLGYTMKVFAKRCDIGDASRGSLSSYAYILMVLYFLQQRKPPVIPVLQEIFDGKQIPQRMVDGWNAFFFDKTEELKKRLPSLGKNTESLGELWLGLLRFYTEEFDFKEYVISIRQKKLLTTFEKQWTSKCIAIEDPFDLNHNLGAGVSRKMTNFIMKAFINGRKLFGTPFYPLIGREAEYFFDSRVLTDGELAPNDRCCRVCGKIGHYMKDCPKRKSLLFRLKKKDSEEEKEGNEEEKDSRDVLDPRDLHDTRDFRDPRDLRCFICGDAGHVRRECPEVKLARQRNSSVAAAQLVRNLVNAQQVAGSAQQQGDQSIRTRQSSECSESPSYSPQPQPFPQNSSQSAAITQPSSQPGSQPKLGPPQQGAQPPHQVQMPLYNFPQSPPAQYSPMHNMGLLPMHPLQIPAPSWPIHGPVIHSAPGSAPSNIGLNDPSIIFAQPAARPVAIPNTSHDGHWPRTVAPNSLVNSGAVGNSEPGFRGLTPPIPWEHAPRPHFPLVPASWPYGLHQNFMHQGNARFQPNKPFYTQDRCATRRCRERCPHPPRGNVSE

SEQ ID NO: 15911 - protein, 1495 aa, Homo Sapiens
MGDTAKPYFVKRTKDRGTMDDDDFRRGHPQQDYLIIDDHAKGHGSKMEKGLQKKKITPGNYGNTPRKGPCAVSSNPYAFKNPIYSQPAWMNDSHKDQSKRWLSDEHTGNSDNWREFKPGPRIPVINRQRKDSFQENEDGYRWQDTRGCRTVRRLFHKDLTSLETTSEMEAGSPENKKQRSRPRKPRKTRNEENEQDGDLEGPVIDESVLSTKELLGLQQAEERLKRDCIDRLKRRPRNYPTAKYTCRLCDVLIESIAFAHKHIKEKRHKKNIKEKQEEELLTTLPPPTPSQINAVGIAIDKVVQEFGLHNENLEQRLEIKRIMENVFQHKLPDCSLRLYGSSCSRLGFKNSDVNIDIQFPAIMSQPDVLLLVQECLKNSDSFIDVDADFHARVPVVVCREKQSGLLCKVSAGNENACLTTKHLTALGKLEPKLVPLVIAFRYWAKLCSIDRPEEGGLPPYVFALMAIFFLQQRKEPLLPVYLGSWIEGFSLSKLGNFNLQDIEKDVVIWEHTDSAAGDTGITKEEAPRETPIKRGQVSLILDVKHQPSVPVGQLWVELLRFYALEFNLADLVISIRVKELVSRELKDWPKKRIAIEDPYSVKRNVARTLNSQPVFEYILHCLRTTYKYFALPHKITKSSLLKPLNAITCISEHSKEVINHHPDVQTKDDKLKNSVLAQGPGATSSAANTCKVQPLTLKETAESFGSPPKEEMGNEHISVHPENSDCIQADVNSDDYKGDKVYHPETGRKNEKEKVGRKGKHLLTVDQKRGEHVVCGSTRNNESESTLDLEGFQNPTAKECEGLATLDNKADLDGESTEGTEELEDSLNHFTHSVQGQTSEMIPSDEEEEDDEEEEEEEEPRLTINQREDEDGMANEDELDNTYTGSGDEDALSEEDDELGEAAKYEDVKECGKHVERALLVELNKISLKEENVCEEKNSPVDQSDFFYEFSKLIFTKGKSPTVVCSLCKREGHLKKDCPEDFKRIQLEPLPPLTPKFLNILDQVCIQCYKDFSPTIIEDQAREHIRQNLESFIRQDFPGTKLSLFGSSKNGFGFKQSDLDVCMTINGLETAEGLDCVRTIEELARVLRKHSGLRNILPITTAKVPIVKFFHLRSGLEVDISLYNTLALHNTRLLSAYSAIDPRVKYLCYTMKVFTKMCDIGDASRGSLSSYAYTLMVLYFLQQRNPPVIPVLQEIYKGEKKPEIFVDGWNIYFFDQIDELPTYWSECGKNTESVGQLWLGLLRFYTEEFDFKEHVISIRRKSLLTTFKKQWTSKYIVIEDPFDLNHNLGAGLSRKMTNFIMKAFINGRRVFGIPVKGFPKDYPSKMEYFFDPDVLTEGELAPNDRCCRICGKIGHFMKDCPMRRKVRRRRDQEDALNQRYPENKEKRSKEDKEIHNKYTEREVSTKEDKPIQCTPQKAKPMRAAADLGREKILRPPVEKWKRQDDKDLREKRCFICGREGHIKKECPQFKGSSGSLSSKYMTQGKASAKRTQQES

SEQ ID NO: 15912 - protein, 1124 aa, Homo Sapiens
MADGPRCKRRKQANPRRNNVTNYNTVVETNSDSDDEDKLHIVEEESVTDAADCEGVPEDDLPTDQTVLPGRSSEREGNAKNCWEDDRKEGQEILGPEAQADEAGCTVKDDECESDAENEQNHDPNVEEFLQQQDTAVIFPEAPEEDQRQGTPEASGHDENGTPDAFSQLLTCPYCDRGYKRFTSLKEHIKYRHEKNEDNFSCSLCSYTFAYRTQLERHMTSHKSGRDQRHVTQSGCNRKFKCTECGKAFKYKHHLKEHLRIHSGEKPYECPNCKKRFSHSGSYSSHISSKKCISLIPVNGRPRTGLKTSQCSSPSLSASPGSPTRPQIRQKIENKPLQEQLSVNQIKTEPVDYEFKPIVVASGINCSTPLQNGVFTGGGPLQATSSPQGMVQAVVLPTVGLVSPISINLSDIQNVLKVAVDGNVIRQVLENNQANLASKEQETINASPIQQGGHSVISAISLPLVDQDGTTKIIINYSLEQPSQLQVVPQNLKKENPVATNSCKSEKLPEDLTVKSEKDKSFEGGVNDSTCLLCDDCPGDINALPELKHYDLKQPTQPPPLPAAEAEKPESSVSSATGDGNLSPSQPPLKNLLSLLKAYYALNAQPSAEELSKIADSVNLPLDVVKKWFEKMQAGQISVQSSEPSSPEPGKVNIPAKNNDQPQSANANEPQDSTVNLQSPLKMTNSPVLPVGSTTNGSRSSTPSPSPLNLSSSRNTQGYLYTAEGAQEEPQVEPLDLSLPKQQGELLERSTITSVYQNSVYSVQEEPLNLSCAKKEPQKDSCVTDSEPVVNVIPPSANPINIAIPTVTAQLPTIVAIADQNSVPCLRALAANKQTILIPQVAYTYSTTVSPAVQEPPLKVIQPNGNQDERQDTSSEGVSNVEDQNDSDSTPPKKKMRKTENGMYACDLCDKIFQKSSSLLRHKYEHTGKRPHECGICKKAFKHKHHLIEHMRLHSGEKPYQCDKCGKRFSHSGSYSQHMNHRYSYCKREAEERDSTEQEEAGPEILSNEHVGARASPSQGDSDERESLTREEDEDSEKEEEEEDKEMEELQEEKECEKPQGDEEEEEEEEEVEEEEVEEAENEGEEAKTEGLMKDDRAESQASSLGQKVGESSEQVSEEKTNEA

SEQ ID NO: 15913 - protein, 1214 aa, Homo Sapiens
MKQPIMADGPRCKRRKQANPRRKNVVNYDNVVDTGSETDEEDKLHIAEDDGIANPLDQETSPASVPNHESSPHVSQALLPREEEEDEIREGGVEHPWHNNEILQASVDGPEEMKEDYDTMGPEATIQTAINNGTVKNANCTSDFEEYFAKRKLEERDGHAVSIEEYLQRSDTAIIYPEAPEELSRLGTPEANGQEENDLPPGTPDAFAQLLTCPYCDRGYKRLTSLKEHIKYRHEKNEENFSCPLCSYTFAYRTQLERHMVTHKPGTDQHQMLTQGAGNRKFKCTECGKAFKYKHHLKEHLRIHSGEKPYECPNCKKRFSHSGSYSSHISSKKCIGLISVNGRMRNNIKTGSSPNSVSSSPTNSAITQLRNKLENGKPLSMSEQTGLLKIKTEPLDFNDYKVLMATHGFSGTSPFMNGGLGATSPLGVHPSAQSPMQHLGVGMEAPLLGFPTMNSNLSEVQKVLQIVDNTVSRQKMDCKAEEISKLKGYHMKDPCSQPEEQGVTSPNIPPVGLPVVSHNGATKSIIDYTLEKVNEAKACLQSLTTDSRRQISNIKKEKLRTLIDLVTDDKMIENHNISTPFSCQFCKESFPGPIPLHQHERYLCKMNEEIKAVLQPHENIVPNKAGVFVDNKALLLSSVLSEKGMTSPINPYKDHMSVLKAYYAMNMEPNSDELLKISIAVGLPQEFVKEWFEQRKVYQYSNSRSPSLERSSKPLAPNSNPPTKDSLLPRSPVKPMDSITSPSIAELHNSVTNCDPPLRLTKPSHFTNIKPVEKLDHSRSNTPSPLNLSSTSSKNSHSSSYTPNSFSSEELQAEPLDLSLPKQMKEPKSIIATKNKTKASSISLDHNSVSSSSENSDEPLNLTFIKKEFSNSNNLDNKSTNPVFSMNPFSAKPLYTALPPQSAFPPATFMPPVQTSIPGLRPYPGLDQMSFLPHMAYTYPTGAATFADMQQRRKYQRKQGFQGELLDGAQDYMSGLDDMTDSDSCLSRKKIKKTESGMYACDLCDKTFQKSSSLLRHKYEHTGKRPHQCQICKKAFKHKHHLIEHSRLHSGEKPYQCDKCGKRFSHSGSYSQHMNHRYSYCKREAEEREAAEREAREKGHLEPTELLMNRAYLQSITPQGYSDSEERESMPRDGESEKEHEKEGEDGYGKLGRQDGDEEFEEEEEESENKSMDTDPETIRDEEETGDHSMDDSSEDGKMETKSDHEEDNMEDGM

SEQ ID NO: 15914 - protein, 1243 aa, Homo Sapiens
METRAAENTAIFMCKCCNLFSPNQSELLSHVSEKHMEEGVNVDEIIIPLRPLSTPEPPNSSKTGDEFLVMKRKRGRPKGSTKKSSTEEELAENIVSPTEDSPLAPEEGNSLPPSSLECSKCCRKFSNTRQLRKHICIIVLNLGEEEGEAGNESDLELEKKCKEDDREKASKRPRSQKTEKVQKISGKEARQLSGAKKPIISVVLTAHEAIPGATKIVPVEAGPPETGATNSETTSADLVPRRGYQEYAIQQTPYEQPMKSSRLGPTQLKIFTCEYCNKVFKFKHSLQAHLRIHTNEKPYKCPQCSYASAIKANLNVHLRKHTGEKFACDYCSFTCLSKGHLKVHIERVHKKIKQHCRFCKKKYSDVKNLIKHIRDAHDPQDKKVKEALDELCLMTREGKRQLLYDCHICERKFKNELDRDRHMLVHGDKWPFACELCGHGATKYQALELHVRKHPFVYVCAVCRKKFVSSIRLRTHIKEVHGAAQEALVFTSSINQSFCLLEPGGDIQQEALGDQLQLVEEEFALQGVNALKEEACPGDTQLEEGRKEPEAPGEMPAPAVHLASPQAESTALPPCELETTVVSSSDLHSQEVVSDDFLLKNDTSSAEAHAAPEKPPDMQHRSSVQTQGEVITLLLSKAQSAGSDQESHGAQSPLGEGQNMAVLSAGDPDPSRCLRSNPAEASDLLPPVAGGGDTITHQPDSCKAAPEHRSGITAFMKVLNSLQKKQMNTSLCERIRKVYGDLECEYCGKLFWYQVHFDMHVRTHTREHLYYCSQCHYSSITKNCLKRHVIQKHSNILLKCPTDGCDYSTPDKYKLQAHLKVHTALDKRSYSCPVCEKSFSEDRLIKSHIKTNHPEVSMSTISEVLGRRVQLKGLIGKRAMKCPYCDFYFMKNGSDLQRHIWAHEGVKPFKCSLCEYATRSKSNLKAHMNRHSTEKTHLCDMCGKKFKSKGTLKSHKLLHTADGKQFKCTVCDYTAAQKPQLLRHMEQHVSFKPFRCAHCHYSCNISGSLKRHYNRKHPNEEYANVGTGELAAEVLIQQGGLKCPVCSFVYGTKWEFNRHLKNKHGLKVVEIDGDPKWETATEAPEEPSTQYLHITEAEEDVQGTQAAVAALQDLRYTSESGDRLDPTAVNILQQIIELGAETHDATALASVVAMAPGTVTVVKQVTEEEPSSNHTVMIQETVQQASVELAEQHHLVVSSDDVEGIETVTVYTQGGEASEFIVYVQEAMQPVEEQAVEQPAQEL

SEQ ID NO: 15915 - protein, 2572 aa, Homo Sapiens
MATLNSASTTGTTPSPGHNAPSLPSDTFSSSTPSDPVTKDPPAASSTSENMRSSEPGGQLLESGCGLVPPKEIGEPQEGPDCGHFPPNDPGVEKDKEQEEEEEGLPPMDLSNHLFFTAGGEAYLVAKLSLPGGSELLLPKGFPWGEAGIKEEPSLPFLAYPPPSHLTALHIQHGFDPIQGFSSSDQILSHDTSAPSPAACEERHGAFWSYQLAPNPPGDPKDGPMGNSGGNHVAVFWLCLLCRLGFSKPQAFMDHTQSHGVKLTPAQYQGLSGSPAVLQEGDEGCKALISFLEPKLPARPSSDIPLDNSSTVNMEANVAQTEDGPPEAEVQALILLDEEVMALSPPSPPTATWDPSPTQAKESPVAAGEAGPDWFPEGQEEDGGLCPPLNQSSPTSKEGGTLPAPVGSPEDPSDPPQPYRLADDYTPAPAAFQGLSLSSHMSLLHSRNSCKTLKCPKCNWHYKYQQTLDVHMREKHPESNSHCSYCSAGGAHPRLARGESYNCGYKPYRCDVCNYSTTTKGNLSIHMQSDKHLANLQGFQAGPGGQGSPPEASLPPSAGDKEPKTKSSWQCKVCSYETNISRNLRIHMTSEKHMQNVLMLHQGLPLGLPPGLMGPGPPPPPGATPTSPPELFQYFGPQALGQPQTPLAGPGLRPDKPLEAQLLLNGFHHVGAPARKFPTSAPGSLSPDAHLPPSQLLGSSSDSLPTSPPPDDSLSLKVFRCLVCQAFSTDSLELLLYHCSIGRSLPEAEWKEVAGDTHRCKLCCYGTQLKANFQLHLKTDKHAQKYQLAAHLREGGGAMGTPSPASLGDGAPYGSVSPLHLRCNICDFESNSKEKMQLHARGAAHEENSQIYKFLLDMEGAEAGAELGLYHCLLCAWETPSRLAVLQHLRTPAHRDAQAQRRLQLLQNGPTTEEGLAALQSILSFSHGQLRTPGKAPVTPLAEPPTPEKDAQNKTEQLASEETENKTGPSRDSANQTTVYCCPYCSFLSPESSQVRAHTLSQHAVQPKYRCPLCQEQLVGRPALHFHLSHLHNVVPECVEKLLLVATTVEMTFTTKVLSAPTLSPLDNGQEPPTHGPEPTPSRDQAAEGPNLTPEASPDPLPEPPLASVEVPDKPSGSPGQPPSPAPSPVPEPDAQAEDVAPPPTMAEEEEGTTGELRSAEPAPADSRHPLTYRKTTNFALDKFLDPARPYKCTVCKESFTQKNILLVHYNSVSHLHKMKKAAIDPSAPARGEAGAPPTTTAATDKPFKCTVCRVSYNQSSTLEIHMRSVLHQTRSRGTKTDSKIEGPERSQEEPKEGETEGEVGTEKKGPDTSGFISGLPFLSPPPPPLDLHRFPAPLFTPPVLPPFPLVPESLLKLQQQQLLLPFYLHDLKVGPKLTLAGPAPVLSLPAATPPPPPQPPKAELAEREWERPPMAKEGNEAGPSSPPDPLPNEAARTAAKALLENFGFELVIQYNEGKQAVPPPPTPPPPEALGGGDKLACGACGKLFSNMLILKTHEEHVHRRFLPFEALSRYAAQFRKSYDSLYPPLAEPPKPPDGSLDSPVPHLGPPFLVPEPEAGGTRAPEERSRAGGHWPIEEEESSRGNLPPLVPAGRRFSRTKFTEFQTQALQSFFETSAYPKDGEVERLASLLGLASRVVVVWFQNARQKARKNACEGGSMPTGGGTGGASGCRRCHATFSCVFELVRHLKKCYDDQTLEEEEEEAERGEEEEEVEEEEVEEEQGLEPPAGPEGPLPEPPDGEELSQAEATKAGGKEPEEKATPSPSPAHTCDQCAISFSSQDLLTSHRRLHFLPSLQPSAPPQLLDLPLLVFGERNPLVAATSPMPGPPLKRKHEDGSLSPTGSEAGGGGEGEPPRDKRLRTTILPEQLEILYRWYMQDSNPTRKMLDCISEEVGLKKRVVQVWFQNTRARERKGQFRSTPGGVPSPAVKPPATATPASLPKFNLLLGKVDDGTGREAPKREAPAFPYPTATLASGPQPFLPPGKEATTPTPEPPLPLLPPPPPSEEEGPEEPPKASPESEACSLSAGDLSDSSASSLAEPESPGAGGTSGGPGGGTGVPDGMGQRRYRTQMSSLQLKIMKACYEAYRTPTMQECEVLGEEIGLPKRVIQVWFQNARAKEKKAKLQGTAAGSTGGSSEGLLAAQRTDCPYCDVKYDFYVSCRGHLFSRQHLAKLKEAVRAQLKSESKCYDLAPAPEAPPALKAPPATTPASMPLGAAPTLPRLAPVLLSGPALAQPPLGNLAPFNSGPAASSGLLGLATSVLPTTTVVQTAGPGRPLPQRPMPDQTNTSTAGTTDPVPGPPTEPLGDKVSSERKPVAGPTSSSNDALKNLKALKTTVPALLGGQFLPFPLPPAGGTAPPAVFGPQLQGAYFQQLYGMKKGLFPMNPMIPQTLIGLLPNALLQPPPQPPEPTATAPPKPPELPAPGEGEAGEVDELLTGSTGISTVDVTHRYLCRQCKMAFDGEAPATAHQRSFCFFGRGSGGSMPPPLRVPICTYHCLACEVLLSGREALASHLRSSAHRRKAAPPQGGPPISITNAATAASAAVAFAKEEARLPHTDSNPKTTTTSTLLAL

SEQ ID NO: 15916 - protein, 3703 aa, Homo Sapiens
MEGCDSPVVSGKDNGCGIPQHQQWTELNSTHLPDKPSSMEQSTGESHGPLDSLRAPFNERLAESTASAGPPSEPASKEVTCNECSASFASLQTYMEHHCPSARPPPPLREESASDTGEEGDEESDVENLAGEIVYQPDGSAYIVESLSQLTQGGGACGSGSGSGPLPSLFLNSLPGAGGKQGDPSCAAPVYPQIINTFHIASSFGKWFEGPDQAFPNTSALAGLSPVLHSFRVFDVRHKSNKDYLNSDGSAKSSCVSKDVPNNVDLSKFDGFVLYGKRKPILMCFLCKLSFGYVRSFVTHAVHDHRMTLSEDERKILSNKNISAIIQGIGKDKEPLVSFLEPKNKNFQHPLVSTANLIGPGHSFYGKFSGIRMEGEEALPAGSAAGPEQPQAGLLTPSTLLNLGGLTSSVLKTPITSVPLGPLASSPTKSSEGKDSGAAEGEKQEVGDGDCFSEKVEPAEEEAEEEEEEEEAEEEEEEEEEEEEEEEDEGCKGLFPSELDEELEDRPHEEPGAAAGSSSKKDLALSNQSISNSPLMPNVLQTLSRGTASTSSNSASSFVVFDGANRRNRLSFNSEGVRANVAEGGRRLDFADESANKDNATAPEPNESTEGDDGGFVPHHQHAGSLCELGVGECPSGSGVECPKCDTVLGSSRSLGGHMTMMHSRNSCKTLKCPKCNWHYKYQQTLEAHMKEKHPEPGGSCVYCKSGQPHPRLARGESYTCGYKPFRCEVCNYSTTTKGNLSIHMQSDKHLNNMQNLQNGGGEQVFSHTAGAAAAAVAAAAAAANISSSCGAPSPTKPKTKPTWRCEVCDYETNVARNLRIHMTSEKHMHNMMLLQQNMTQIQHNRHLGLGSLPSPAEAELYQYYLAQNMNLPNLKMDSAASDAQFMMSGFQLDPAGPMAAMTPALVGGEIPLDMRLGGGQLVSEELMNLGESFIQTNDPSLKLFQCAVCNKFTTDNLDMLGLHMNVERSLSEDEWKAVMGDSYQCKLCRYNTQLKANFQLHCKTDKHVQKYQLVAHIKEGGKANEWRLKCVAIGNPVHLKCNACDYYTNSLEKLRLHTVNSRHEASLKLYKHLQQHESGVEGESCYYHCVLCNYSTKAKLNLIQHVRSMKHQRSESLRKLQRLQKGLPEEDEDLGQIFTIRRCPSTDPEEAIEDVEGPSETAADPEELAKDQEGGASSSQAEKELTDSPATSKRISFPGSSESPLSSKRPKTAEEIKPEQMYQCPYCKYSNADVNRLRVHAMTQHSVQPMLRCPLCQDMLNNKIHLQLHLTHLHSVAPDCVEKLIMTVTTPEMVMPSSMFLPAAVPDRDGNSNLEEAGKQPETSEDLGKNILPSASTEQSGDLKPSPADPGSVREDSGFICWKKGCNQVFKTSAALQTHFNEVHAKRPQLPVSDRHVYKYRCNQCSLAFKTIEKLQLHSQYHVIRAATMCCLCQRSFRTFQALKKHLETSHLELSEADIQQLYGGLLANGDLLAMGDPTLAEDHTIIVEEDKEEESDLEDKQSPTGSDSGSVQEDSGSEPKRALPFRKGPNFTMEKFLDPSRPYKCTVCKESFTQKNILLVHYNSVSHLHKLKRALQESATGQPEPTSSPDNKPFKCNTCNVAYSQSSTLEIHMRSVLHQTKARAAKLEAASGSSNGTGNSSSISLSSSTPSPVSTSGSNTFTTSNPSSAGIAPSSNLLSQVPTESVGMPPLGNPIGANIASPSEPKEANRKKLADMIASRQQQQQQQQQQQQQQQQQQQAQTLAQAQAQVQAHLQQELQQQAALIQSQLFNPTLLPHFPMTTETLLQLQQQQHLLFPFYIPSAEFQLNPEVSLPVTSGALTLTGTGPGLLEDLKAQVQVPQQSHQQILPQQQQNQLSIAQSHSALLQPSQHPEKKNKLVIKEKEKESQRERDSAEGGEGNTGPKETLPDALKAKEKKELAPGGGSEPSMLPPRIASDARGNATKALLENFGFELVIQYNENKQKVQKKNGKTDQGENLEKLECDSCGKLFSNILILKSHQEHVHQNYFPFKQLERFAKQYRDHYDKLYPLRPQTPEPPPPPPPPPPPPLPAAPPQPASTPAIPASAPPITSPTIAPAQPSVPLTQLSMPMELPIFSPLMMQTMPLQTLPAQLPPQLGPVEPLPADLAQLYQHQLNPTLLQQQNKRPRTRITDDQLRVLRQYFDINNSPSEEQIKEMADKSGLPQKVIKHWFRNTLFKERQRNKDSPYNFSNPPITSLEELKIDSRPPSPEPPKQEYWGSKRSSRTRFTDYQLRVLQDFFDANAYPKDDEFEQLSNLLNLPTRVIVVWFQNARQKARKNYENQGEGKDGERRELTNDRYIRTSNLNYQCKKCSLVFQRIFDLIKHQKKLCYKDEDEEGQDDSQNEDSMDAMEILTPTSSSCSTPMPSQAYSAPAPSANNTASSAFLQLTAEAEELATFNSKTEAGDEKPKLAEAPSAQPNQTQEKQGQPKPELQQQEQPEQKTNTPQQKLPQLVSLPSLPQPPPQAPPPQCPLPQSSPSPSQLSHLPLKPLHTSTPQQLANLPPQLIPYQCDQCKLAFPSFEHWQEHQQLHFLSAQNQFIHPQFLDRSLDMPFMLFDPSNPLLASQLLSGAIPQIPASSATSPSTPTSTMNTLKRKLEEKASASPGENDSGTGGEEPQRDKRLRTTITPEQLEILYQKYLLDSNPTRKMLDHIAHEVGLKKRVVQVWFQNTRARERKGQFRAVGPAQAHRRCPFCRALFKAKTALEAHIRSRHWHEAKRAGYNLTLSAMLLDCDGGLQMKGDIFDGTSFSHLPPSSSDGQGVPLSPVSKTMELSPRTLLSPSSIKVEGIEDFESPSMSSVNLNFDQTKLDNDDCSSVNTAITDTTTGDEGNADNDSATGIATETKSSSAPNEGLTKAAMMAMSEYEDRLSSGLVSPAPSFYSKEYDNEGTVDYSETSSLADPCSPSPGASGSAGKSGDSGDRPGQKRFRTQMTNLQLKVLKSCFNDYRTPTMLECEVLGNDIGLPKRVVQVWFQNARAKEKKSKLSMAKHFGINQTSYEGPKTECTLCGIKYSARLSVRDHIFSQQHISKVKDTIGSQLDKEKEYFDPATVRQLMAQQELDRIKKANEVLGLAAQQQGMFDNTPLQALNLPTAYPALQGIPPVLLPGLNSPSLPGFTPSNTALTSPKPNLMGLPSTTVPSPGLPTSGLPNKPSSASLSSPTPAQATMAMGPQQPPQQQQQQQQPQVQQPPPPPAAQPPPTPQLPLQQQQQRKDKDSEKVKEKEKAHKGKGEPLPVPKKEKGEAPTATAATISAPLPTMEYAVDPAQLQALQAALTSDPTALLTSQFLPYFVPGFSPYYAPQIPGALQSGYLQPMYGMEGLFPYSPALSQALMGLSPGSLLQQYQQYQQSLQEAIQQQQQRQLQQQQQQKVQQQQPKASQTPVPPGAPSPDKDPAKESPKPEEQKNTPREVSPLLPKLPEEPEAESKSADSLYDPFIVPKVQYKLVCRKCQAGFSDEEAARSHLKSLCFFGQSVVNLQEMVLHVPTGGGGGGSGGGGGGGGGGGGGGSYHCLACESALCGEEALSQHLESALHKHRTITRAARNAKEHPSLLPHSACFPDPSTASTSQSAAHSNDSPPPPSAAAPSSASPHASRKSWPQVVSRASAAKPPSFPPLSSSSTVTSSSCSTSGVQPSMPTDDYSEESDTDLSQKSDGPASPVEGPKDPSCPKDSGLTSVGTDTFRL

SEQ ID NO: 15917 - protein, 3567 aa, Homo Sapiens
METCDSPPISRQENGQSTSKLCGTTQLDNEVPEKVAGMEPDRENSSTDDNLKTDERKSEALLGFSVENAAATQVTSAKEIPCNECATSFPSLQKYMEHHCPNARLPVLKDDNESEISELEDSDVENLTGEIVYQPDGSAYIIEDSKESGQNAQTGANSKLFSTAMFLDSLASAGEKSDQSASAPMSFYPQIINTFHIASSLGKPFTADQAFPNTSALAGVGPVLHSFRVYDLRHKREKDYLTSDGSAKNSCVSKDVPNNVDLSKFDGCVSDGKRKPVLMCFLCKLSFGYIRSFVTHAVHDHRMTLNDEEQKLLSNKCVSAIIQGIGKDKEPLISFLEPKKSTSVYPHFSTTNLIGPDPTFRGLWSAFHVENGDSLPAGFAFLKGSASTSSSAEQPLGITQMPKAEVNLGGLSSLVVNTPITSVSLSHSSSESSKMSESKDQENNCERPKESNVLHPNGECPVKSEPTEPGDEDEEDAYSNELDDEEVLGELTDSIGNKDFPLLNQSISPLSSSVLKFIEKGTSSSSATVSDDTEKKKQTAAVRASGSVASNYGISGKDFADASASKDSATAAHPSEIARGDEDSSATPHQHGFTPSTPGTPGPGGDGSPGSGIECPKCDTVLGSSRSLGGHMTMMHSRNSCKTLKCPKCNWHYKYQQTLEAHMKEKHPEPGGSCVYCKTGQPHPRLARGESYTCGYKPFRCEVCNYSTTTKGNLSIHMQSDKHLNNVQNLQNGNGEQVFGHSAPAPNTSLSGCGTPSPSKPKQKPTWRCEVCDYETNVARNLRIHMTSEKHMHNMMLLQQNMKQIQHNLHLGLAPAEAELYQYYLAQNIGLTGMKLENPADPQLMINPFQLDPATAAALAPGLGELSPYISDPALKLFQCAVCNKFTSDSLEALSVHVSSERSLPEEEWRAVIGDIYQCKLCNYNTQLKANFQLHCKTDKHMQKYQLVAHIKEGGKSNEWRLKCIAIGNPVHLKCNACDYYTNSVDKLRLHTTNHRHEAALKLYKHLQKQEGAVNPESCYYYCAVCDYTTKVKLNLVQHVRSVKHQQTEGLRKLQLHQQGLAPEEDNLSEIFFVKDCPPNELETASLGARTCDDDLTEQHEEAEGAIKPTAVAEDDEKDTSERDNSEGKNSNKDSVSVAGGTQPLLLAKEEDVATKRSKPTEDNKFCHEQFYQCPYCNYNSRDQSRIQMHVLSQHSVQPVICCPLCQDVLSNKMHLQLHLTHLHSVSPDCVEKLLMTVPVPDVMMPNSMLLPAAASEKSERDTPAAVTAEGSGKYSGESPMDDKSMAGLEDSKANVEVKNEEQKPTKEPLEVSEWNKNSSKDVKIPDTLQDQLNEQQKRQPLSVSDRHVYKYRCNHCSLAFKTMQKLQIHSQYHAIRAATMCNLCQRSFRTFQALKKHLEAGHPELSEAELQQLYASLPVNGELWAESETMSQDDHGLEQEMEREYEVDHEGKASPVGSDSSSIPDDMGSEPKRTLPFRKGPNFTMEKFLDPSRPYKCTVCKESFTQKNILLVHYNSVSHLHKLKKVLQEASSPVPQETNSNTDNKPYKCSICNVAYSQSSTLEIHMRSVLHQTKARAAKLEPSGHVAGGHSIAANVNSPGQGMLDSMSLAAVNSKDTHLDAKELNKKQTPDLISAQPAHHPPQSPAQIQMQLQHELQQQAAFFQPQFLNPAFLPHFPMTPEALLQFQQPQFLFPFYIPGTEFSLGPDLGLPGSATFGMPGMTGMAGSLLEDLKQQIQTQHHVGQTQLQILQQQAQQYQATQPQLQPQKQQQQPPPPQQQQQQQASKLLKQEQSNIVSADCQIMKDVPSYKEAEDISEKPEKPKQEFISEGEGLKEGKDTKKQKSLEPSIPPPRIASGARGNAAKALLENFGFELVIQYNENRQKVQKKGKSGEGENTDKLECGTCGKLFSNVLILKSHQEHVHGQFFPYAALEKFARQYREAYDKLYPISPSSPETPPPPPPPPPLPPAPPQPSSMGPVKIPNTVSTPLQAPPPTPPPPPPPPPPPPPPPPPPPPSAPPQVQLPVSLDLPLFPSIMMQPVQHPALPPQLALQLPQMDALSADLTQLCQQQLGLDPNFLRHSQFKRPRTRITDDQLKILRAYFDINNSPSEEQIQEMAEKSGLSQKVIKHWFRNTLFKERQRNKDSPYNFSNPPITVLEDIRIDPQPTSLEHYKSDASFSKRSSRTRFTDYQLRVLQDFFDTNAYPKDDEIEQLSTVLNLPTRVIVVWFQNARQKARKSYENQAETKDNEKRELTNERYIRTSNMQYQCKKCNVVFPRIFDLITHQKKQCYKDEDDDAQDESQTEDSMDATDQVVYKHCTVSGQTDAAKNAAAPAASSGSGTSTPLIPSPKPEPEKTSPKPEYPAEKPKQSDPSPPSQGTKPALPLASTSSDPPQASTAQPQPQPQPPKQPQLIGRPPSASQTPVPSSPLQISMTSLQNSLPPQLLQYQCDQCTVAFPTLELWQEHQHMHFLAAQNQFLHSPFLERPMDMPYMIFDPNNPLMTGQLLGSSLTQMPPQASSSHTTAPTTVAASLKRKLDDKEDNNCSEKEGGNSGEDQHRDKRLRTTITPEQLEILYEKYLLDSNPTRKMLDHIAREVGLKKRVVQVWFQNTRARERKGQFRAVGPAQSHKRCPFCRALFKAKSALESHIRSRHWNEGKQAGYSLPPSPLISTEDGGESPQKYIYFDYPSLPLTKIDLSSENELASTVSTPVSKTAELSPKNLLSPSSFKAECSEDVENLNAPPAEAGYDQNKTDFDETSSINTAISDATTGDEGNTEMESTTGSSGDVKPALSPKEPKTLDTLPKPATTPTTEVCDDKFLFSLTSPSIHFNDKDGDHDQSFYITDDPDDNADRSETSSIADPSSPNPFGSSNPFKSKSNDRPGHKRFRTQMSNLQLKVLKACFSDYRTPTMQECEMLGNEIGLPKRVVQVWFQNARAKEKKFKINIGKPFMINQGGTEGTKPECTLCGVKYSARLSIRDHIFSKQHISKVRETVGSQLDREKDYLAPTTVRQLMAQQELDRIKKASDVLGLTVQQPGMMDSSSLHGISLPTAYPGLPGLPPVLLPGMNGPSSLPGFPQNSNISAGMLGFPTSATSSPALSLSSAPTKPLLQTPPPPPPPPPPPPSSSLSGQQTEQQNKESEKKQTKPNKVKKIKEEELEATKPEKHPKKEEKISSALSVLGKVVGETHVDPIQLQALQNAIAGDPASFIGGQFLPYFIPGFASYFTPQLPGTVQGGYFPPVCGMESLFPYGPTMPQTLAGLSPGALLQQYQQYQQNLQESLQKQQKQQQEQQQKPVQAKTSKVESDQPQNSNDASETKEDKSTATESTKEEPQLESKSADFSDTYVVPFVKYEFICRKCQMMFTDEDAAVNHQKSFCYFGQPLIDPQETVLRVPVSKYQCLACDVAISGNEALSQHLQSSLHKEKTIKQAMRNAKEHVRLLPHSVCSPNPNTTSTSQSAASSNNTYPHLSCFSMKSWPNILFQASARRAASPPSSPPSLSLPSTVTSSLCSTSGVQTSLPTESCSDESDSELSQKLEDLDNSLEVKAKPASGLDGNFNSIRMDMFSV

SEQ ID NO: 15918 - protein, 407 aa, Homo Sapiens
MNKSQGSVSFTDVTVDFTQEEWEQLDPSQRILYMDVMLENYSNLLSVEVWKADDQMERDHRNPDEQARQFLILKNQTPIEERGDLFGKALNLNTDFVSLRQVPYKYDLYEKTLKYNSDLLNSNRSYAGKQTDECNEFGKALLYLKQEKTHSGVEYSEYNKSGKALSHKAAIFKHQKIKNLVQPFICTYCDKAFSFKSLLISHKRIHTGEKPYECNVCKKTFSHKANLIKHQRIHTGEKPFECPECGKAFTHQSNLIVHQRAHMEKKPYECSECGKTFAQKFELTTHQRIHTGERPYECNECAKTFFKKSNLIIHQKIHTGEKRYECSECGKSFIQNSQLIIHMRTHTGEKPYECTECGKTFSQRSTLRLHLRIHTGEKPYECSECGKAFSRKSRLSVHQRVHIGEKP

SEQ ID NO: 15919 - protein, 533 aa, Homo Sapiens
MAHGSVTFRDVAIDFSQEEWEFLDPAQRDLYRDVMWENYSNFISLGPSISKPDVITLLDEERKEPGMVVREGTRRYCPDLESRYRTNTLSPEKDIYEIYSFQWDIMERIKSYSLQGSIFRNDWECKSKIEGEKEQQEGYFGQVKITSEKMTTYKRHNFLTEYQIVHNGEKVYECKECRKTFIRRSTLSQHLRIHTGEKPYKCKECGQAFRQRAHLIRHHKLHTGEKPYECKECGKAFTVLQELTQHQRLHTGEKPYECKECGKAFRVHQQLARHQRIHTGEKPYECKDCGKTFRQCTHLTRHQRLHTAEKLYECKECGKAFVCGPDLRVHQKIHFGEKPYECKECGKAFRICQQLTVHQSIHTGEKPYECKECGKTFRLRQQLVRHQRIHTREKPYECMECWKTFSSYSQLISHQSIHIGERPYECEECGKAFRLLSQLTQHQSIHTGEKPYECKECRKPFRLLSQLTQHQSIHTGEKPYECKECGKAFRLYSFLTQHQRIHTGEKPYKCKECKKAFRQHSHLTQHQKIHNGI

SEQ ID NO: 15920 - protein, 461 aa, Homo Sapiens
MEREGIWHSTLGETWEPNNWLEGQQDSHLSQVGVTHKETFTEMRVCGGNEFERCSSQDSILDTQQSIPMVKRPHNCNSHGEDATQNSELIKTQRMFVGKKIYECNQCSKTFSQSSSLLKHQRIHTGEKPYKCNVCGKHFIERSSLTVHQRIHTGEKPYKCNECGKAFSQSMNLTVHQRTHTGEKPYQCKECGKAFHKNSSLIQHERIHTGEKPYKCNECGKAFTQSMNLTVHQRTHTGEKPYECNECGKAFSQSMHLIVHQRSHTGEKPYECSQCGKAFSKSSTLTLHQRNHTGEKPYKCNKCGKSFSQSTYLIEHQRLHSGVKPFECNECGKAFSKNSSLTQHRRIHTGEKPYECMVCGKHFTGRSSLTVHQVIHTGEKPYECNECGKAFSQSAYLIEHQRIHTGEKPYECDQCGKAFIKNSSLTVHQRTHTGEKPYQCNECGKAFSRSTNLTRHQRTHT

SEQ ID NO: 15921 - protein, 868 aa, Homo Sapiens
MRGAASASVREPTPLPGRGAPRTKPRAGRGPTVGTPATLALPARGRPRSRNGLASKGQRGAAPTGPGHRALPSRDTALPQERNKKLEAVGTGIEPKAMSQGLVTFGDVAVDFSQEEWEWLNPIQRNLYRKVMLENYRNLASLGLCVSKPDVISSLEQGKEPWTVKRKMTRAWCPDLKAVWKIKELPLKKDFCEGKLSQAVITERLTSYNLEYSLLGEHWDYDALFETQPGLVTIKNLAVDFRQQLHPAQKNFCKNGIWENNSDLGSAGHCVAKPDLVSLLEQEKEPWMVKRELTGSLFSGQRSVHETQELFPKQDSYAEGVTDRTSNTKLDCSSFRENWDSDYVFGRKLAVGQETQFRQEPITHNKTLSKERERTYNKSGRWFYLDDSEEKVHNRDSIKNFQKSSVVIKQTGIYAGKKLFKCNECKKTFTQSSSLTVHQRIHTGEKPYKCNECGKAFSDGSSFARHQRCHTGKKPYECIECGKAFIQNTSLIRHWRYYHTGEKPFDCIDCGKAFSDHIGLNQHRRIHTGEKPYKCDVCHKSFRYGSSLTVHQRIHTGEKPYECDVCRKAFSHHASLTQHQRVHSGEKPFKCKECGKAFRQNIHLASHLRIHTGEKPFECAECGKSFSISSQLATHQRIHTGEKPYECKVCSKAFTQKAHLAQHQKTHTGEKPYECKECGKAFSQTTHLIQHQRVHTGEKPYKCMECGKAFGDNSSCTQHQRLHTGQRPYECIECGKAFKTKSSLICHRRSHTGEKPYECSVCGKAFSHRQSLSVHQRIHSGKKPYECKECRKTFIQIGHLNQHKRVHTGERSYNYKKSRKVFRQTAHLAHHQRIHTGESSTCPSLPSTSNPVDLFPKFLWNPSSLPSP

SEQ ID NO: 15922 - protein, 502 aa, Homo Sapiens
MGTENKEVIPKEEISEESEPHGSLLEKFPKVVYQGHEFGAGCEEDMLEGHSRESMEEVIEQMSPQERDFPSGLMIFKKSPSSEKDRENNESERGCSPSPNLVTHQGDTTEGVSAFATSGQNFLEILESNKTQRSSVGEKPHTCKECGKAFNQNSHLIQHMRVHSGEKPFECKECGKTFGTNSSLRRHLRIHAGEKPFACNECGKAFIQSSHLIHHHRIHTGERPYKCEECGKAFSQNSALILHQRIHTGEKPYECNECGKTFRVSSQLIQHQRIHTEERYHECNECGKAFKHSSGLIRHQKIHTGEKPYLCNECGKGFGQSSELIRHQRIHTGDKPYECNECGKTFGQNSEIIRHIRIHTGEKPYVCKECGKAFRGNSELLRHERIHTGEKPYECFECGKAFRRTSHLIVHQRIHTGEKPHQCNECARTFWDNSELLLHQKIHIGEKPYECSECEKTFSQHSQLIIHQRIHTGEKPYECQECQKTFSRSSHLLRHQSVHCME

SEQ ID NO: 15923 - protein, 519 aa, Homo Sapiens
MARDLVMFRDVAVDFSQEEWECLNSYQRNLYRDVILENYSNLVSLAGCSISKPDVITLLEQGKEPWMVVRDEKRRWTLDLESRYDTKKLFQGKDIYEMNLSQWKVMERIKSCGLEEQESPHEVCFRQVTKTTSEKMPTYRKLTSLPLYQKSHNREKPYECGECGKAFRVRQQLTFHQRIHTGEKPYECKECGKAFRQCAHLSRHQRIHTSDKLYECKKCGKIFTCGSDLRVHQRIHIGEKPYECKECGKAFRVRGQLNLHQRIHTGEKPYECKECGKAFRQYAHLTRHQRLNIAEKCYECKECGQAFLCSTGLRLHHKLHTGEKPYECKECGKAFRVRQQLTLHQRIHTGEKPYDCKECGKTFSRGYHLTLHQRIHTGEKPYECKECQKFFRRYSELISHQGIHIGEKPYECKECGKAFRLFSQLTQHQSIHFGEKPFKCKECEKTFRLLSQLTQHQSIHTGEKPYDCKECGKAFRLHSSLIQHQRIHSGEKPYKCKECKKAFRQHSHLTYHQRIHNVT

SEQ ID NO: 15924 - protein, 338 aa, Homo Sapiens
MTTTLVSATIFDLSEVLCKGNKMLNYSAPSAGGCLLDRKAVGTPAGGGFPRRHSVTLPSSKFHQNQLLSSLKGEPAPALSSRDSRFRDRSFSEGGERLLPTQKQPGGGQVNSSRYKTELCRPFEENGACKYGDKCQFAHGIHELRSLTRHPKYKTELCRTFHTIGFCPYGPRCHFIHNAEERRALAGARDLSADRPRLQHSFSFAGFPSAAATAAATGLLDSPTSITPPPILSADDLLGSPTLPDGTNNPFAFSSQELASLFAPSMGLPGGGSPTTFLFRPMSESPHMFDSPPSPQDSLSDQEGYLSSSSSSHSGSDSPTLDNSRRLPIFSRLSISDD

SEQ ID NO: 15925 - protein, 494 aa, Homo Sapiens
MSTTLLSAFYDVDFLCKTEKSLANLNLNNMLDKKAVGTPVAAAPSSGFAPGFLRRHSASNLHALAHPAPSPGSCSPKFPGAANGSSCGSAAAGGPTSYGTLKEPSGGGGTALLNKENKFRDRSFSENGDRSQHLLHLQQQQKGGGGSQINSTRYKTELCRPFEESGTCKYGEKCQFAHGFHELRSLTRHPKYKTELCRTFHTIGFCPYGPRCHFIHNADERRPAPSGGASGDLRAFGTRDALHLGFPREPRPKLHHSLSFSGFPSGHHQPPGGLESPLLLDSPTSRTPPPPSCSSASSCSSSASSCSSASAASTPSGAPTCCASAAAAAAAALLYGTGGAEDLLAPGAPCAACSSASCANNAFAFGPELSSLITPLAIQTHNFAAVAAAAYYRSQQQQQQQGLAPPAQPPAPPSATLPAGAAAPPSPPFSFQLPRRLSDSPVFDAPPSPPDSLSDRDSYLSGSLSSGSLSGSESPSLDPGRRLPIFSRLSISDD

SEQ ID NO: 15926 - protein, 630 aa, Homo Sapiens
MSVSSGVQILTKPETVDRRRSAETTKEAGRPLEMAVSEPEASAAEWKQLDPAQSNLYNDVMLENYCNQASMGCQAPKPDMISKLEKGEAPWLGKGKRPSQGCPSKIARPKQKETDGKVQKDDDQLENIQKSQNKLLREVAVKKKTQAKKNGSDCGSLGKKNNLHKKHVPSKKRLLKFESCGKILKQNLDLPDHSRNCVKRKSDAAKEHKKSFNHSLSDTRKGKKQTGKKHEKLSSHSSSDKCNKTGKKHDKLCCHSSSHIKQDKIQTGEKHEKSPSLSSSTKHEKPQACVKPYECNQCGKVLSHKQGLIDHQRVHTGEKPYECNECGIAFSQKSHLVVHQRTHTGEKPYECIQCGKAHGHKHALTDHLRIHTGEKPYECAECGKTFRHSSNLIQHVRSHTGEKPYECKECGKSFRYNSSLTEHVRTHTGEIPYECNECGKAFKYSSSLTKHMRIHTGEKPFECNECGKAFSKKSHLIIHQRTHTKEKPYKCNECGKAFGHSSSLTYHMRTHTGESPFECNQCGKGFKQIEGLTQHQRVHTGEKPYECNECGKAFSQKSHLIVHQRTHTGEKPYECNECEKAFNAKSQLVIHQRSHTGEKPYECNECGKTFKQNASLTKHVKTHSEDKSHE

SEQ ID NO: 15927 - protein, 198 aa, Homo Sapiens
MEKPAGRKKKTPTPREEADVQKSALREEKVSGDRKPPERPTVPRKPRTEPCLSPEDEEHVFDAFDASFKDDFEGVPVFIPFQRKKPYECSECGRIFKHKTDHIRHQRVHTGEKPFKCAQCGKAFRHSSDVTKHQRTHTGEKPFKCGECGKAFNCGSNLLKHQKTHTGEKPYECTHCGKAFAYSSCLIRHQKRHPRKKP

SEQ ID NO: 15928 - protein, 310 aa, Homo Sapiens
MSQQLKKRAKTRHQKGLGGRAPSGAKPRQGKSSQDLQAEIEPVSAVWALCDGYVCYEPGPQALGGDDFSDCYIECVIRGEFSQPILEEDSLFESLEYLKKGSEQQLSQKVFEASSLECSLEYMKKGVKKELPQKIVGENSLEYSEYMTGKKLPPGGIPGIDLSDPKQLAEFARKKPPINKEYDSLSAIACPQSGCTRKLRNRAALRKHLLIHGPRDHVCAECGKAFVESSKLKRHFLVHTGEKPFRCTFEGCGKRFSLDFNLRTHVRIHTGEKRFVCPFQGCNRRFIQSNNLKAHILTHANTNKNEQEGK

SEQ ID NO: 15929 - protein, 452 aa, Homo Sapiens
MAAGEPRSLLFFQKPVTFEDVAVNFTQEEWDCLDASQRVLYQDVMSETFKNLTSVARIFLHKPELITKLEQEEEQWRETRVLQASQAGPPFFCYTCGKCFSRRSYLYSHQFVHNPKLTNSCSQCGKLFRSPKSLSYHRRMHLGERPFCCTLCDKTYCDASGLSRHRRVHLGYRPHSCSVCGKSFRDQSELKRHQKIHQNQEPVDGNQECTLRIPGTQAEFQTPIARSQRSIQGLLDVNHAPVARSQEPIFRTEGPMAQNQASVLKNQAPVTRTQAPITGTLCQDARSNSHPVKPSRLNVFCCPHCSLTFSKKSYLSRHQKAHLTEPPNYCFHCSKSFSSFSRLVRHQQTHWKQKSYLCPICDLSFGEKEGLMDHWRGYKGKDLCQSSHHKCRVILGQWLGFSHDVPTMAGEEWKHGGDQSPPRIHTPRRRGLREKACKGDKTKEAVSILKHK

SEQ ID NO: 15930 - protein, 900 aa, Homo Sapiens
MSHLKTSTEDEEPTEEYENVGNAASKWPKVEDPMPESKVGDTCVWDSKVENQQKKPVENRMKEDKSSIREAISKAKSTANIKTEQEGEASEKSLHLSPQHITHQTMPIGQRGSEQGKRVENINGTSYPSLQQKTNAVKKLHKCDECGKSFKYNSRLVQHKIMHTGEKRYECDDCGGTFRSSSSLRVHKRIHTGEKPYKCEECGKAYMSYSSLINHKSTHSGEKNCKCDECGKSFNYSSVLDQHKRIHTGEKPYECGECGKAFRNSSGLRVHKRIHTGEKPYECDICGKTFSNSSGLRVHKRIHTGEKPYECDECGKAFITCRTLLNHKSIHFGDKPYKCDECEKSFNYSSLLIQHKVIHTGEKPYECDECGKAFRNSSGLIVHKRIHTGEKPYKCDVCGKAFSYSSGLAVHKSIHPGKKAHECKECGKSFSYNSLLLQHRTIHTGERPYVCDVCGKTFRNNAGLKVHRRLHTGEKPYKCDVCGKAYISRSSLKNHKGIHLGEKPYKCSYCEKSFNYSSALEQHKRIHTREKPFGCDECGKAFRNNSGLKVHKRIHTGERPYKCEECGKAYISLSSLINHKSVHPGEKPFKCDECEKAFITYRTLTNHKKVHLGEKPYKCDVCEKSFNYTSLLSQHRRVHTREKPYECDRCEKVFRNNSSLKVHKRIHTGERPYECDVCGKAYISHSSLINHKSTHPGRTPHTCDECGKAFFSSRTLISHKRVHLGEKPFKCVECGKSFSYSSLLSQHKRIHTGEKPYVCDRCGKAFRNSSGLTVHKRIHTGEKPYECDECGKAYISHSSLINHKSVHQGKQPYNCECGKSFNYRSVLDQHKRIHTGKKPYRCNECGKAFNIRSNLTKHKRTHTGEESLNVIYVGSYSGTSQKRTYEGGNALDGGRMRMPL

SEQ ID NO: 15931 - protein, 681 aa, Homo Sapiens
MNASSEGESFAGSVQIPGGTTVLVELTPDIHICGICKQQFNNLDAFVAHKQSGCQLTGTSAAAPSTVQFVSEETVPATQTQTTTRTITSETQTITVSAPEFVFEHGYQTYLPTESNENQTATVISLPAKSRTKKPTTPPAQKRLNCCYPGCQFKTAYGMKDMERHLKIHTGDKPHKCEVCGKCFSRKDKLKTHMRCHTGVKPYKCKTCDYAAADSSSLNKHLRIHSDERPFKCQICPYASRNSSQLTVHLRSHTGDAPFQCWLCSAKFKISSDLKRHMRVHSGEKPFKCEFCNVRCTMKGNLKSHIRIKHSGNNFKCPHCDFLGDSKATLRKHSRVHQSEHPEKCSECSYSCSSKAALRIHERIHCTDRPFKCNYCSFDTKQPSNLSKHMKKFHGDMVKTEALERKDTGRQSSRQVAKLDAKKSFHCDICDASFMREDSLRSHKRQHSEYSESKNSDVTVLQFQIDPSKQPATPLTVGHLQVPLQPSQVPQFSEGRVKIIVGHQVPQANTIVQAAAAAVNIVPPALVAQNPEELPGNSRLQILRQVSLIAPPQSSRCPSEAGAMTQPAVLLTTHEQTDGATLHQTLIPTASGGPQEGSGNQTFITSSGITCTDFEGLNALIQEGTAEVTVVSDGGQNIAVATTAPPVFSSSSQQELPKQTYSIIQGAAHPALLCPADSIPD

SEQ ID NO: 15932 - protein, 645 aa, Homo Sapiens
MNASSEGESFAGSVQIPGGTTVLVELTPDIHICGICKQQFNNLDAFVAHKQSGCQLTGTSAAAPSTVQFVSEETVPATQTQTTTRTITSETQTITVSAPEFVFEHGYQTYLPTESNENQTATVISLPAKSRTKKPTTPPAQKRLNCCYPGCQFKTAYGMKDMERHLKIHTGDKPHKCEVCGKCFSRKDKLKTHMRCHTGVKPYKCKTCDYAAADSSSLNKHLRIHSDERPFKCQICPYASRNSSQLTVHLRSHTASELDDDVPKANCLSTESTDTPKAPVITLPSEAREQMATLGERTFNCCYPGCHFKTVHGMKDLDRHLRIHTGDKPHKCEFCDKCFSRKDNLTMHMRCHTSVKPHKCHLCDYAAVDSSSLKKHLRIHSDERPYKCQLCPYASRNSSQLTVHLRSHTGDTPFQCWLCSAKFKISSDLKRHMIVHSGEKPFKCEFCDVRCTMKANLKSHIRIKHTFKCLHCAFQGRDRADLLEHSRLHQADHPEKCPECSYSCSSAAALRVHSRVHCKDRPFKCDFCSFDTKRPSSLAKHVDKVHRDEAKTENRAPLGKEGLREGSSQHVAKIVTQRAFRCETCGASFVRDDSLRCHKKQHSDQSENKNSDLVTFPPESGASGQLSTLVSVGQLEAPLEPSQDL

SEQ ID NO: 15933 - protein, 526 aa, Homo Sapiens
MPQQLLITLPTEASTWVKLQHPKKAVEGAPLWEDVTKMFEGEALLSQDAEDVKTQRESLEDEVTPGLPTAESQELLTFKDISIDFTQEEWGQLAPAHQNLYREVMLENYSNLVSVGYQLSKPSVISQLEKGEEPWMAEKEGPGDPSSDLKSKIETIESTAKSTISQERLYHGIMMESFMRDDIIYSTLRKVSTYDDVLERHQETCMRDVRQAILTHKKRVQETNKFGENIIVHSNVIIEQRHHKYDTPTKRNTYKLDLINHPTSYIRTKTYECNICEKIFKQPIHLTEHMRIHTGEKPFRCKECGRAFSQSASLSTHQRIHTGEKPFECEECGKAFRHRSSLNQHHRTHTGEKPYVCDKCQKAFSQNISLVQHLRTHSGEKPFTCNECGKTFRQIRHLSEHIRIHTGEKPYACTACCKTFSHRAYLTHHQRIHTGERPYKCKECGKAFRQRIHLSNHKTVHTGVKAYECNRCGKAYRHDSSFKKHQRHHTGEKPYECNECGKAFSYNSSLSRHHEIHRRNAFRNKV

SEQ ID NO: 15934 - protein, 534 aa, Homo Sapiens
MLQQLLITLPTEASTWVKLRHPKAATERVALWEDVTKMFKAEALLSQDADETQGESLESRVTLGSLTAESQELLTFKDVSVDFTQEEWGQLAPAHRNLYREVMLENYGNLVSVGCQLSKPGVISQLEKGEEPWLMERDISGVPSSDLKSKTKTKESALQNDISWEELHCGLMMERFTKGSSMYSTLGRISKCNKLESQQENQRMGKGQIPLMCKKTFTQERGQESNRFEKRINVKSEVMPGPIGLPRKRDRKYDTPGKRSRYNIDLVNHSRSYTKMKTFECNICEKIFKQLIHLTEHMRIHTGEKPFRCKECGKAFSQSSSLIPHQRIHTGEKPYECKECGKTFRHPSSLTQHVRIHTGEKPYECRVCEKAFSQSIGLIQHLRTHVREKPFTCKDCGKAFFQIRHLRQHEIIHTGVKPYICNVCSKTFSHSTYLTQHQRTHTGERPYKCKECGKAFSQRIHLSIHQRVHTGVKPYECSHCGKAFRHDSSFAKHQRIHTGEKPYDCNECGKAFSCSSSLIRHCKTHLRNTFSNVV

SEQ ID NO: 15935 - protein, 532 aa, Homo Sapiens
MALRSVMFSDVSIDFSPEEWEYLDLEQKDLYRDVMLENYSNLVSLGCFISKPDVISSLEQGKEPWKVVRKGRRQYPDLETKYETKKLSLENDIYEINLSQWKIMERIENHGLKGLILKNDWESTGKIEGQERPQEGYFSSVKMPSEKVSSYQKRTSVTPHQRLHFVDKPYECKECGKAFRVRQQLTFHHRIHTGEKPYECKECGMAFRQTAHLTRHQRLHSGEKLYECKECGEAFICGADLRVHQKMHIGEKPYECKECGKAFRVRGQLTLHQRIHTGEKPYVCKECGKAFRQYAHLTRHQKLNSADRLYECKECGKAFLCGSGLRVHHKLHTGEKPYECKECGKAFRVRQQLTLHQRIHTGEKPYECKECGKTFSRGYHLILHHRIHTGEKPYECKECWKAFSRYSQLISHQSIHIGVKPYDCKECGKAFRLLSQLTQHQSIHIGEKPYKCKECGKAFRLRQKLTLHQSIHTGEKPFECKECRKAFRLNSSLIQHLRIHSGEKPYECKECKKAFRQHSHLTHHLKIHNVKI

SEQ ID NO: 15936 - protein, 636 aa, Homo Sapiens
MAPRPPTAAPQESVTFKDVSVDFTQEEWYHVDPAQRSLYRDVMLENYSHLVSLGYQVSKPEVIFKLEQGEEPWISEGEIQRPFYPDWKTRPEVKSSHLQQDVSEVSHCTHDLLHATLEDSWDVSSQLDRQQENWKRHLGSEASTQKKIITPQENFEQNKFGENSRLNTNLVTQLNIPARIRPSECETLGSNLGHNADLLNENNILAKKKPYKCDKCRKAFIHRSSLTKHEKTHKGEGAFPNGTDQGIYPGKKHHECTDCGKTFLWKTQLTEHQRIHTGEKPFECNVCGKAFRHSSSLGQHENAHTGEKPYQCSLCGKAFQRSSSLVQHQRIHTGEKPYRCNLCGRSFRHGTSLTQHEVTHSGEKPFQCKECGKAFSRCSSLVQHERTHTGEKPFECSICGRAFGQSPSLYKHMRIHKRGKPYQSSNYSIDFKHSTSLTQDESTLTEVKSYHCNDCGEDFSHITDFTDHQRIHTAENPYDCEQAFSQQAISHPGEKPYQCNVCGKAFKRSTSFIEHHRIHTGEKPYECNECGEAFSRRSSLTQHERTHTGEKPYECIDCGKAFSQSSSLIQHERTHTGEKPYECNECGRAFRKKTNLHDHQRIHTGEKPYSCKECGKNFSRSSALTKHQRIHTRNKL

SEQ ID NO: 15937 - protein, 570 aa, Homo Sapiens
MPGETEEPRPPEQQDQEGGEAAKAAPEEPQQRPPEAVAAAPAGTTSSRVLRGGRDRGRAAAAAAAAAVSRRRKAEYPRRRRSSPSARPPDVPGQQPQAAKSPSPVQGKKSPRLLCIEKVTTDKDPKEEKEEEDDSALPQEVSIAASRPSRGWRSSRTSVSRHRDTENTRSSRSKTGSLQLICKSEPNTDQLDYDVGEEHQSPGGISSEEEEEEEEEMLISEEEIPFKDDPRDETYKPHLERETPKPRRKSGKVKEEKEKKEIKVEVEVEVKEEENEIREDEEPPRKRGRRRKDDKSPRLPKRRKKPPIQYVRCEMEGCGTVLAHPRYLQHHIKYQHLLKKKYVCPHPSCGRLFRLQKQLLRHAKHHTDQRDYICEYCARAFKSSHNLAVHRMIHTGEKPLQCEICGFTCRQKASLNWHMKKHDADSFYQFSCNICGKKFEKKDSVVAHKAKSHPEVLIAEALAANAGALITSTDILGTNPESLTQPSDGQGLPLLPEPLGNSTSGECLLLEAEGMSKSYCSGTERVSLMADGKIFVGSGSSGGTEGLVMNSDILGATTEVLIEDSDSAGP

SEQ ID NO: 15938 - protein, 416 aa, Homo Sapiens
MAAILLTTRPKVPVSFEDVSVYFTKTEWKLLDLRQKVLYKRVMLENYSHLVSLGFSFSKPHLISQLERGEGPWVADIPRTWATAGLHIGDRTQSKTSTSTQKHSGRQLPGADPQGGKEGQAARSSVLQRGAQGLGQSSAAGPQGPKGAEKRYLCQQCGKAFSRSSNLIKHRIIHSGEKPYACPECGKLFRRSFALLEHQRIHSGEKPYACPECSKTFTRSSNLIKHQVIHSGERPFACGDCGKLFRRSFALLEHARVHSGERPYACPECGKAFSRSSNLIEHQRTHRGEKPYACGQCAKAFKGVSQLIHHQRSHSGERPFACRECGKAFRGRSGLSQHRRVHSGEKPYECSDCGKAFGRRANLFKHQAVHGARRPAKAETARRLAGPGSTGPGSAVAATSPPRPSTAARPSRPSRR

SEQ ID NO: 15939 - protein, 1006 aa, Homo Sapiens
MSRRKQSNPRQIKRSLGDMEAREEVQLVGASHMEQKATAPEAPSPPSADVNSPPPLPPPTSPGGPKELEGQEPEPRPTEEEPGSPWSGPDELEPVVQDGQRRIRARLSLATGLSWGPFHGSVQTRASSPRQAEPSPALTLLLVDEACWLRTLPQALTEAEANTEIHRKDDALWCRVTKPVPAGGLLSVLLTAEPHSTPGHPVKKEPAEPTCPAPAHDLQLLPQQAGMASILATAVINKDVFPCKDCGIWYRSERNLQAHLLYYCASRQGTGSPAAAATDEKPKETYPNERVCPFPQCRKSCPSASSLEIHMRSHSGERPFVCLICLSAFTTKANCERHLKVHTDTLSGVCHSCGFISTTRDILYSHLVTNHMVCQPGSKGEIYSPGAGHPATKLPPDSLGSFQQQHTALQGPLASADLGLAPTPSPGLDRKALAEATNGEARAEPLAQNGGSSEPPAAPRSIKVEAVEEPEAAPILGPGEPGPQAPSRTPSPRSPAPARVKAELSSPTPGSSPVPGELGLAGALFLPQYVFGPDAAPPASEILAKMSELVHSRLQQGAGAGAGGAQTGLFPGAPKGATCFECEITFSNVNNYYVHKRLYCSGRRAPEDAPAARRPKAPPGPARAPPGQPAEPDAPRSSPGPGAREEGAGGAATPEDGAGGRGSEGSQSPGSSVDDAEDDPSRTLCEACNIRFSRHETYTVHKRYYCASRHDPPPRRPAAPPGPPGPAAPPAPSPAAPVRTRRRRKLYELHAAGAPPPPPPGHAPAPESPRPGSGSGSGPGLAPARSPGPAADGPIDLSKKPRRPLPGAPAPALADYHECTACRVSFHSLEAYLAHKKYSCPAAPPPGALGLPAAACPYCPPNGPVRGDLLEHFRLAHGLLLGAPLAGPGVEARTPADRGPSPAPAPAASPQPGSRGPRDGLGPEPQEPPPGPPPSPAAAPEAVPPPPAPPSYSDKGVQTPSKGTPAPLPNGNHRYCRLCNIKFSSLSTFIAHKKYYCSSHAAEHVK

SEQ ID NO: 15940 - protein, 1151 aa, Homo Sapiens
MSRRKQSKPRQIKRPLEDAIEDEEEECPSEETDIISKGDFPLEESFSTEFGPENLSCEEVEYFCNKGDDEGIQETAESDGDTQSEKPGQPGVETDDWDGPGELEVFQKDGERKIQSRQQLPVGTTWGPFPGKMDLNNNSLKTKAQVPMVLTAGPKWLLDVTWQGVEDNKNNCIVYSKGGQLWCTTTKAISEGEELIAFVVDFDSRLQAASQMTLTEGMYPARLLDSIQLLPQQAAMASILPTAIVNKDIFPCKSCGIWYRSERNLQAHLMYYCSGRQREAAPVSEENEDSAHQISSLCPFPQCTKSFSNARALEMHLNSHSGVKMEEFLPPGASLKCTVCSYTADSVINFHQHLFSHLTQAAFRCNHCHFGFQTQRELLQHQELHVPSGKLPRESDMEHSPSATEDSLQPATDLLTRSELPQSQKAMQTKDASSDTELDKCEKKTQLFLTNQRPEIQPTTNKQSFSYTKIKSEPSSPRLASSPVQPNIGPSFPVGPFLSQFSFPQDITMVPQASEILAKMSELVHRRLRHGSSSYPPVIYSPLMPKGATCFECNITFNNLDNYLVHKKHYCSSRWQQMAKSPEFPSVSEKMPEALSPNTGQTSINLLNPAAHSADPENPLLQTSCINSSTVLDLIGPNGKGHDKDFSTQTKKLSTSSNNDDKINGKPVDVKNPSVPLVDGESDPNKTTCEACNITFSRHETYMVHKQYYCATRHDPPLKRSASNKVPAMQRTMRTRKRRKMYEMCLPEQEQRPPLVQQRFLDVANLNNPCTSTQEPTEGLGECYHPRCDIFPGIVSKHLETSLTINKCVPVSKCDTTHSSVSCLEMDVPIDLSKKCLSQSERTTTSPKRLLDYHECTVCKISFNKVENYLAHKQNFCPVTAHQRNDLGQLDGKVFPNPESERNSPDVSYERSIIKCEKNGNLKQPSPNGNLFSSHLATLQGLKVFSEAAQLIATKEENRHLFLPQCLYPGAIKKAKGADQLSPYYGIKPSDYISGSLVIHNTDIEQSRNAENESPKGQASSNGCAALKKDSLPLLPKNRGMVIVNGGLKQDERPAANPQQENISQNPQHEDDHKSPSWISENPLAANENVSPGIPSAEEQLSSIAKGVNGSSQAPTSGKYCRLCDIQFNNLSNFITHKKFYCSSHAAEHVK

SEQ ID NO: 15941 - protein, 805 aa, Homo Sapiens
MDEDGLELQQEPNSFFDATGADGTHMDGDQIVVEVQETVFVSDVVDSDITVHNFVPDDPDSVVIQDVIEDVVIEDVQCPDIMEEADVSETVIIPEQVLDSDVTEEVSLAHCTVPDDVLASDITSASMSMPEHVLTGDSIHVSDVGHVGHVGHVEHVVHDSVVEAEIVTDPLTTDVVSEEVLVADCASEAVIDANGIPVDQQDDDKGNCEDYLMISLDDAGKIEHDGSSGMTMDTESEIDPCKVDGTCPEVIKVYIFKADPGEDDLGGTVDIVESEPENDHGVELLDQNSSIRVPREKMVYMTVNDSQPEDEDLNVAEIADEVYMEVIVGEEDAAAAAAAAAVHEQQMDDNEIKTFMPIAWAAAYGNNSDGIENRNGTASALLHIDESAGLGRLAKQKPKKRRRPDSRQYQTAIIIGPDGHPLTVYPCMICGKKFKSRGFLKRHMKNHPEHLAKKKYRCTDCDYTTNKKISLHNHLESHKLTSKAEKAIECDECGKHFSHAGALFTHKMVHKEKGANKMHKCKFCEYETAEQGLLNRHLLAVHSKNFPHICVECGKGFRHPSELKKHMRIHTGEKPYQCQYCEYRSADSSNLKTHVKTKHSKEMPFKCDICLLTFSDTKEVQQHALIHQESKTHQCLHCDHKSSNSSDLKRHIISVHTKDYPHKCDMCDKGFHRPSELKKHVAAHKGKKMHQCRHCDFKIADPFVLSRHILSVHTKDLPFRCKRCRKGFRQQSELKKHMKTHSGRKVYQCEYCEYSTTDASGFKRHVISIHTKDYPHRCEYCKKGFRRPSEKNQHIMRHHKEVGLP

SEQ ID NO: 15942 - protein, 801 aa, Homo Sapiens
MDEDEFELQPQEPNSFFDGIGADATHMDGDQIVVEIQEAVFVSNIVDSDITVHNFVPDDPDSVVIQDVVEDVVIEEDVQCSDILEEADVSENVIIPEQVLDSDVTEEVSLPHCTVPDDVLASDITSTSMSMPEHVLTSESMHVCDIGHVEHMVHDSVVEAEIITDPLTSDIVSEEVLVADCAPEAVIDASGISVDQQDNDKASCEDYLMISLDDAGKIEHDGSTGVTIDAESEMDPCKVDSTCPEVIKVYIFKADPGEDDLGGTVDIVESEPENDHGVELLDQNSSIRVPREKMVYMTVNDSQQEDEDLNVAEIADEVYMEVIVGEEDAAVAAAAAAVHEQQIDEDEMKTFVPIAWAAAYGNNSDGIENRNGTASALLHIDESAGLGRLAKQKPKKKRRPDSRQYQTAIIIGPDGHPLTVYPCMICGKKFKSRGFLKRHMKNHPEHLAKKKYHCTDCDYTTNKKISLHNHLESHKLTSKAEKAIECDECGKHFSHAGALFTHKMVHKEKGANKMHKCKFCEYETAEQGLLNRHLLAVHSKNFPHICVECGKGFRHPSELRKHMRIHTGEKPYQCQYCEYRSADSSNLKTHIKTKHSKEMPFKCDICLLTFSDTKEVQQHTLVHQESKTHQCLHCDHKSSNSSDLKRHVISVHTKDYPHKCEMCEKGFHRPSELKKHVAVHKGKKMHQCRHCDFKIADPFVLSRHILSVHTKDLPFRCKRCRKGFRQQNELKKHMKTHSGRKVYQCEYCEYSTTDASGFKRHVISIHTKDYPHRCEYCKKGFRRPSEKNQHIMRHHKEVGLP

SEQ ID NO: 15943 - protein, 2539 aa, Homo Sapiens [sequence omitted]

SEQ ID NO: 15944 - protein, 271 aa, Homo Sapiens
MTEPQVGCVACPRVHKEPAQVGTPWPAKPRSHPRKRDPTALLPRSLWPACQESVTALCFLQETVERLGQSPAQDTPVLGPCWDPMALGTQGRLLLDRDSKDTQTRISQKGRRLQPPGTPSAPPQRRPRKQLNPCRGTERVDPGFEGVTLKFQIKPDSSLQIIPTYSLPCSSRSQESPADAVGGPAAHPGGTEAHSAGSEALEPRRCASCRTQRTPLWRDAEDGTPLCNACGIRYKKYGTRCSSCWLVPRKNVQPKRLCGRCGVSLDPIQEG

SEQ ID NO: 15945 - protein, 531 aa, Homo Sapiens
MDEESLESALQTYRAQLQQVELALGAGLDSSEQADLRQLQGDLKELIELTEASLVSVRKSSLLAALDEERPGRQEDAEYQAFREAITEAVEAPAAARGSGSETVPKAEAGPESAAGGQEEEEGEDEEELSGTKVSAPYYSSWGTLEYHNAMVVGTEEAEDGSAGVRVLYLYPTHKSLKPCPFFLEGKCRFKENCRFSHGQVVSLDELRPFQDPDLSSLQAGSACLAKHQDGLWHAARITDVDNGYYTVKFDSLLLREAVVEGDGILPPLRTEATESDSDSDGTGDSSYARVVGSDAVDSAQSSALCPSLAVVGSDAVDSGTCSSAFAGWEVHTRGIGSRLLTKMGYEFGKGLGRHAEGRVEPIHAVVLPRGKSLDQCVETLQKQTRVGKAGTNKPPRCRGRGARPGGRPAPRNVFDFLNEKLQGQAPGALEAGAAPAGRRSKDMYHASKSAKRALSLRLFQTEEKIERTQRDIRSIQEALARNAGRHSVASAQLQEKLAGAQRQLGQLRAQEAGLQQEQRKADTHKKMTEF

SEQ ID NO: 15946 - protein, 873 aa, Homo Sapiens
MASRRKSTTPCMVLASEQDPDLELISDLDEGPPVLTPVENTRAESISSDEEVHESVDSDNQQNKKVEGGYECKYCTFQTPDLNMFTFHVDSEHPNVVLNSSYVCVECNFLTKRYDALSEHNLKYHPGEENFKLTMVKRNNQTIFEQTINDLTFDGSFVKEENAEQAESTEVSSSGISISKTPIMKMMKNKVENKRIAVHHNSVEDVPEEKENEIKPDREEIVENPSSSASESNTSTSIVNRIHPSTASTVVTPAAVLPGLAQVITAVSAQQNSNLIPKVLIPVNSIPTYNAALDNNPLLLNTYNKFPYPTMSEITVLSAQAKYTEEQIKIWFSAQRLKHGVSWTPEEVEEARRKQFNGTVHTVPQTITVIPTHISTGSNGLPSILQTCQIVGQPGLVLTQVAGTNTLPVTAPIALTVAGVPSQNNIQKSQVPAAQPTAETKPATAAVPTSQSVKHETALVNPDSFGIRAKKTKEQLAELKVSYLKNQFPHDSEIIRLMKITGLTKGEIKKWFSDTRYNQRNSKSNQCLHLNNDSSTTIIIDSSDETTESPTVGTAQPKQSWNPFPDFTPQKFKEKTAEQLRVLQASFLNSSVLTDEELNRLRAQTKLTRREIDAWFTEKKKSKALKEEKMEIDESNAGSSKEEAGETSPADESGAPKSGSTGKICKKTPEQLHMLKSAFVRTQWPSPEEYDKLAKESGLARTDIVSWFGDTRYAWKNGNLKWYYYYQSANSSSMNGLSSLRKRGRGRPKGRGRGRPRGRPRGSKRINNWDRGPSLIKFKTGTAILKDYYLKHKFLNEQDLDELVNKSHMGYEQVREWFAERQRRSELGIELFEENEEEDEVIDDQEEDEEETDDSDTWEPPRHVKRKLSKSDD

SEQ ID NO: 15947 - protein, 837 aa, Homo Sapiens
MASKRKSTTPCMVRTSQVVEQDVPEEVDRAKEKGIGTPQPDVAKDSWAAELENSSKENEVIEVKSMGESQSKKLQGGYECKYCPYSTQNLNEFTEHVDMQHPNVILNPLYVCAECNFTTKKYDSLSDHNSKFHPGEANFKLKLIKRNNQTVLEQSIETTNHVVSITTSGPGTGDSDSGISVSKTPIMKPGKPKADAKKVPKKPEEITPENHVEGTARLVTDTAEILSRLGGVELLQDTLGHVMPSVQLPPNINLVPKVPVPLNTTKYNSALDTNATMINSFNKFPYPTQAELSWLTAASKHPEEHIRIWFATQRLKHGISWSPEEVEEARKKMFNGTIQSVPPTITVLPAQLAPTKVTQPILQTALPCQILGQTSLVLTQVTSGSTTVSCSPITLAVAGVTNHGQKRPLVTPQAAPEPKRPHIAQVPEPPPKVANPPLTPASDRKKTKEQIAHLKASFLQSQFPDDAEVYRLIEVTGLARSEIKKWFSDHRYRCQRGIVHITSESLAKDQLAIAASRHGRTYHAYPDFAPQKFKEKTQGQVKILEDSFLKSSFPTQAELDRLRVETKLSRREIDSWFSERRKLRDSMEQAVLDSMGSGKKGQDVGAPNGALSRLDQLSGAQLTSSLPSPSPAIAKSQEQVHLLRSTFARTQWPTPQEYDQLAAKTGLVRTEIVRWFKENRCLLKTGTVKWMEQYQHQPMADDHGYDAVARKATKPMAESPKNGGDVVPQYYKDPKKLCEEDLEKLVTRVKVGSEPAKDCLPAKPSEATSDRSEGSSRDGQGSDENEESSVVDYVEVTVGEEDAISDRSDSWSQAAAEGVSELAESDSDCVPAEAGQA

SEQ ID NO: 15948 - protein, 956 aa, Homo Sapiens
MASKRKSTTPCMIPVKTVVLQDASMEAQPAETLPEGPQQDLPPEASAASSEAAQNPSSTDGSTLANGHRSTLDGYLYSCKYCDFRSHDMTQFVGHMNSEHTDFNKDPTFVCSGCSFLAKTPEGLSLHNATCHSGEASFVWNVAKPDNHVVVEQSIPESTSTPDLAGEPSAEGADGQAEIIITKTPIMKIMKGKAEAKKIHTLKENVPSQPVGEALPKLSTGEMEVREGDHSFINGAVPVSQASASSAKNPHAANGPLIGTVPVLPAGIAQFLSLQQQPPVHAQHHVHQPLPTAKALPKVMIPLSSIPTYNAAMDSNSFLKNSFHKFPYPTKAELCYLTVVTKYPEEQLKIWFTAQRLKQGISWSPEEIEDARKKMFNTVIQSVPQPTITVLNTPLVASAGNVQHLIQAALPGHVVGQPEGTGGGLLVTQPLMANGLQATSSPLPLTVTSVPKQPGVAPINTVCSNTTSAVKVVNAAQSLLTACPSITSQAFLDASIYKNKKSHEQLSALKGSFCRNQFPGQSEVEHLTKVTGLSTREVRKWFSDRRYHCRNLKGSRAMIPGDHSSIIIDSVPEVSFSPSSKVPEVTCIPTTATLATHPSAKRQSWHQTPDFTPTKYKERAPEQLRALESSFAQNPLPLDEELDRLRSETKMTRREIDSWFSERRKKVNAEETKKAEENASQEEEEAAEDEGGEEDLASELRVSGENGSLEMPSSHILAERKVSPIKINLKNLRVTEANGRNEIPGLGACDPEDDESNKLAEQLPGKVSCKKTAQQRHLLRQLFVQTQWPSNQDYDSIMAQTGLPRPEVVRWFGDSRYALKNGQLKWYEDYKRGNFPPGLLVIAPGNRELLQDYYMTHKMLYEEDLQNLCDKTQMSSQQVKQWFAEKMGEETRAVADTGSEDQGPGTGELTAVHKGMGDTYSEVSENSESWEPRVPEASSEPFDTSSPQAGRQLETD

SEQ ID NO: 15949 - protein, 447 aa, Homo Sapiens
MLLDAGPQYPAIGVTTFGASRHHSAGDVAERDVGLGINPFADGMGAFKLNPSSHELASAGQTAFTSQAPGYAAAAALGHHHHPGHVGSYSSAAFNSTRDFLFRNRGFGDAAAAASAQHSLFAASAGGFGGPHGHTDAAGHLLFPGLHEQAAGHASPNVVNGQMRLGFSGDMYPRPEQYGQVTSPRSEHYAAPQLHGYGPMNVNMAAHHGAGAFFRYMRQPIKQELICKWIEPEQLANPKKSCNKTFSTMHELVTHVTVEHVGGPEQSNHICFWEECPREGKPFKAKYKLVNHIRVHTGEKPFPCPFPGCGKVFARSENLKIHKRTHTGEKPFKCEFEGCDRRFANSSDRKKHMHVHTSDKPYLCKMCDKSYTHPSSLRKHMKVHESSSQGSQPSPAASSGYESSTPPTIVSPSTDNPTTSSLSPSSSAVHHTAGHSALSSNFNEWYV

SEQ ID NO: 15950 - protein, 532 aa, Homo Sapiens
MLLDAGPQFPAIGVGSFARHHHHSAAAAAAAAAEMQDRELSLAAAQNGFVDSAAAHMGAFKLNPGAHELSPGQSSAFTSQGPGAYPGSAAAAAAAAALGPHAAHVGSYSGPPFNSTRDFLFRSRGFGDSAPGGGQHGLFGPGAGGLHHAHSDAQGHLLFPGLPEQHGPHGSQNVLNGQMRLGLPGEVFGRSEQYRQVASPRTDPYSAAQLHNQYGPMNMNMGMNMAAAAAHHHHHHHHHPGAFFRYMRQQCIKQELICKWIDPEQLSNPKKSCNKTFSTMHELVTHVSVEHVGGPEQSNHVCFWEECPREGKPFKAKYKLVNHIRVHTGEKPFPCPFPGCGKVFARSENLKIHKRTHTGEKPFQCEFEGCDRRFANSSDRKKHMHVHTSDKPYLCKMCDKSYTHPSSLRKHMKVHESSPQGSESSPAASSGYESSTPPGLVSPSAEPQSSSNLSPAAAAAAAAAAAAAAAVSAVHRGGGSGSGGAGGGSGGGSGSGGGGGGAGGGGGGSSGGGSGTAGGHSGLSSNFNEWYV

SEQ ID NO: 15951 - protein, 467 aa, Homo Sapiens
MTMLLDGGPQFPGLGVGSFGAPRHHEMPNREPAGMGLNPFGDSTHAAAAAAAAAAFKLSPAAAHDLSSGQSSAFTPQGSGYANALGHHHHHHHHHHHTSQVPSYGGAASAAFNSTREFLFRQRSSGLSEAASGGGQHGLFAGSASSLHAPAGIPEPPSYLLFPGLHEQGAGHPSPTGHVDNNQVHLGLRGELFGRADPYRPVASPRTDPYAAGAQFPNYSPMNMNMGVNVAAHHGPGAFFRYMRQPIKQELSCKWIDEAQLSRPKKSCDRTFSTMHELVTHVTMEHVGGPEQNNHVCYWEECPREGKSFKAKYKLVNHIRVHTGEKPFPCPFPGCGKIFARSENLKIHKRTHTGEKPFKCEFEGCDRRFANSSDRKKHMHVHTSDKPYICKVCDKSYTHPSSLRKHMKVHESQGSDSSPAASSGYESSTPPAIASANSKDTTKTPSAVQTSTSHNPGLPPNFNEWYV

SEQ ID NO: 15952 - protein, 334 aa, Homo Sapiens; identical to SEQ ID NO: 14389

SEQ ID NO: 15953 - protein, 663 aa, Homo Sapiens
MFLKAGRGNKVPPVRVYGPDCVVLMEPPLSKRNPPALRLADLATAQVQPLQNMTGFPALAGPPAHSQLRAAVAHLRLRDLGADPGVATTPLGPEHMAQASTLGLSPPSQAFPAHPEAPAAAARAAALVAHPGAGSYPCGGGSSGAQPSAPPPPAPPLPPTPSPPPPPPPPPPPALSGYTTTNSGGGGSSGKGHSRDFVLRRDLSATAPAAAMHGAPLGGEQRSGTGSPQHPAPPPHSAGMFISASGTYAGPDGSGGPALFPALHDTPGAPGGHPHPLNGQMRLGLAAAAAAAAAELYGRAEPPFAPRSGDAHYGAVAAAAAAALHGYGAVNLNLNLAAAAAAAAAGPGPHLQHHAPPPAPPPPPAPAQHPHQHHPHLPGAAGAFLRYMRQPIKQELICKWIDPDELAGLPPPPPPPPPPPPPPPAGGAKPCSKTFGTMHELVNHVTVEHVGGPEQSSHVCFWEDCPREGKPFKAKYKLINHIRVHTGEKPFPCPFPGCGKVFARSENLKIHKRTHTGEKPFKCEFDGCDRKFANSSDRKKHSHVHTSDKPYYCKIRGCDKSYTHPSSLRKHMKIHCKSPPPSPGPLGYSSVGTPVGAPLSPVLDPARSHSSTLSPQVTNLNEWYVCQASGAPSHLHTPSSNGTTSETEDEEIYGNPEVVRTIH

SEQ ID NO: 15954 - protein, 487 aa, Homo Sapiens
MAAAALRAPTQVTVSPETHMDLTKGCVTFEDIAIYFSQDEWGLLDEAQRLLYLEVMLENFALVASLGCGHGTEDEETPSDQNVSVGVSQSKAGSSTQKTQSCEMCVPVLKDILHLADLPGQKPYLVGECTNHHQHQKHHSAKKSLKRDMDRASYVKCCLFCMSLKPFRKWEVGKDLPAMLRLLRSLVFPGGKKPGTITECGEDIRSQKSHYKSGECGKASRHKHTPVYHPRVYTGKKLYECSKCGKAFRGKYSLVQHQRVHTGERPWECNECGKFFSQTSHLNDHRRIHTGERPYECSECGKLFRQNSSLVDHQKIHTGARPYECSQCGKSFSQKATLVKHQRVHTGERPYKCGECGNSFSQSAILNQHRRIHTGAKPYECGQCGKSFSQKATLIKHQRVHTGERPYKCGDCGKSFSQSSILIQHRRIHTGARPYECGQCGKSFSQKSGLIQHQVVHTGERPYECNKCGNSFSQCSSLIHHQKCHNT

SEQ ID NO: 15955 - protein, 527 aa, Homo Sapiens
MYQPEDDNNSDVTSDDDMTRNRRESSPPHSVHSFSGDRDWDRRGRSRDMEPRDRWSHTRNPRSRMPPRDLSLPVVAKTSFEMDREDDRDSRAYESRSQDAESYQNVVDLAEDRKPHNTIQDNMENYRKLLSLGFLAQDSVPAEKRNTEMLDNLPSAGSQFPDFKHLGTFLVFEELVTFEDVLVDFSPEELSSLSAAQRNLYREVMLENYRNLVSLGHQFSKPDIISRLEEEESYAMETDSRHTVICQGESHDDPLEPHQGNQEKLLTPITMNDPKTLTPERSYGSDEFERSSNLSKQSKDPLGKDPQEGTAPGICTSPQSASQENKHNRCEFCKRTFSTQVALRRHERIHTGKKPYECKQCAEAFYLMPHLNRHQKTHSGRKTSGCNEGRKPSVQCANLCERVRIHSQEDYFECFQCGKAFLQNVHLLQHLKAHEAARVLPPGLSHSKTYLIRYQRKHDYVGERACQCCDCGRVFSRNSYLIQHYRTHTQERPYQCQLCGKCFGRPSYLTQHYQLHSQEKTVECDHC

SEQ ID NO: 15956 - protein, 472 aa, Homo Sapiens
MNNSQGRVTFEDVTVNFTQGEWQRLNPEQRNLYRDVMLENYSNLVSVGQGETTKPDVILRLEQGKEPWLEEEEVLGSGRAEKNGDIGGQIWKPKDVKESLAREVPSINKETLTTQKGVECDGSKKILPLGIDDVSSLQHYVQNNSHDDNGYRKLVGNNPSKFVGQQLKCNACRKLFSSKSRLQSHLRRHACQKPFECHSCGRAFGEKWKLDKHQKTHAEERPYKCENCGNAYKQKSNLFQHQKMHTKEKPYQCKTCGKAFSWKSSCINHEKIHNAKKSYQCNECEKSFRQNSTLIQHKKVHTGQKPFQCTDCGKAFIYKSDLVKHQRIHTGEKPYKCSICEKAFSQKSNVIDHEKIHTGKRAYECDLCGNTFIQKKNLIQHKKIHTGEKPYECNRCGKAFFQKSNLHSHQKTHSGERTYRCSECGKTFIRKLNLSLHKKTHTGQKPYGCSECGKAFADRSYLVRHQKRIHSR

SEQ ID NO: 15957 - protein, 563 aa, Homo Sapiens
MMTAESREATGLSPQAAQEKDGIVIVKVEEEDEEDHMWGQDSTLQDTPPPDPEIFRQRFRRFCYQNTFGPREALSRLKELCHQWLRPEINTKEQILELLVLEQFLSILPKELQVWLQEYRPDSGEEAVTLLEDLELDLSGQQVPGQVHGPEMLARGMVPLDPVQESSSFDLHHEATQSHFKHSSRKPRLLQSRALPAAHIPAPPHEGSPRDQAMASALFTADSQAMVKIEDMAVSLILEEWGCQNLARRNLSRDNRQENYGSAFPQGGENRNENEESTSKAETSEDSASRGETTGRSQKEFGEKRDQEGKTGERQQKNPEEKTRKEKRDSGPAIGKDKKTITGERGPREKGKGLGRSFSLSSNFTTPEEVPTGTKSHRCDECGKCFTRSSSLIRHKIIHTGEKPYECSECGKAFSLNSNLVLHQRIHTGEKPHECNECGKAFSHSSNLILHQRIHSGEKPYECNECGKAFSQSSDLTKHQRIHTGEKPYECSECGKAFNRNSYLILHRRIHTREKPYKCTKCGKAFTRSSTLTLHHRIHARERASEYSPASLDAFGAFLKSCV

SEQ ID NO: 15958 - protein, 967 aa, Homo Sapiens
MAVALDSQIDAPLEVEGCLIMKVEKDPEWASEPILEGSDSSETFRKCFRQFCYEDVTGPHEAFSKLWELCCRWLKPEMRSKEQILELLVIEQFLTILPEKIQAWAQKQCPQSGEEAVALVVHLEKETGRLRQQVSSPVHREKHSPLGAAWEVADFQPEQVETQPRAVSREEPGSLHSGHQEQLNRKRERRPLPKNARPSPWVPALADEWNTLDQEVTTTRLPAGSQEPVKDVHVARGFSYRKSVHQIPAQRDLYRDFRKENVGNVVSLGSAVSTSNKITRLEQRKEPWTLGLHSSNKRSILRSNYVKEKSVHAIQVPARSAGKTWREQQQWGLEDEKIAGVHWSYEETKTFLAILKESRFYETLQACPRNSQVYGAVAEWLRECGFLRTPEQCRTKFKSLQKSYRKVRNGHMLEPCAFFEDMDALLNPAARAPSTDKPKEMIPVPRLKRIAISAKEHISLVEEEEAAEDSDDDEIGIEFIRKSEIHGAPVLFQNLSGVHWGYEETKTFLDILRETRFYEALQACHRKSKLYGAVAEQLRECGFLRTPEQCRTKFKSLQKSYRKVKNGHVLESCAFYKEMDALINSRASAPSPSTPEEVPSPSRQERGGIEVEPQEPTGWEPEETSQEAVIEDSCSERMSEEEIVQEPEFQGPPGLLQSPNDFEIGSSIKEDPTQIVYKDMEQHRALIEKSKRVVSQSTDPSKYRKRECISGRQWENLQGIRQGKPMSQPRDLGKAVVHQRPFVGKRPYRLLKYGESFGRSTRLMCRMTHHKENPYKCGVCGKCFGRSRSLIRHQRIHTGEKPFKCLDCGKSFNDSSNFGAHQRIHTGEKPYRCGECGKCFSQSSSLIIHQRTHTGEKPYQCGECGKSFTNSSHFSAHRRVHTGENPYKCVDCEKSFNNCTRFREHRRIHTGEKPYGCAQCGKRFSKSSVLTKHREVHVREKPLPHPPSLYCPENPHKGKTDEFRKTF

SEQ ID NO: 15959 - protein, 538 aa, Homo Sapiens
MARELSESTALDAQSTEDQMELLVIKVEEEEAGFPSSPDLGSEGSRERFRGFRYPEAAGPREALSRLRELCRQWLQPEMHSKEQILELLVLEQFLTILPGNLQSWVREQHPESGEEVVVLLEYLERQLDEPAPQVSGVDQGQELLCCKMALLTPAPGSQSSQFQLMKALLKHESVGSQPLQDRVLQVPVLAHGGCCREDKVVASRLTPESQGLLKVEDVALTLTPEWTQQDSSQGNLCRDEKQENHGSLVSLGDEKQTKSRDLPPAEELPEKEHGKISCHLREDIAQIPTCAEAGEQEGRLQRKQKNATGGRRHICHECGKSFAQSSGLSKHRRIHTGEKPYECEECGKAFIGSSALVIHQRVHTGEKPYECEECGKAFSHSSDLIKHQRTHTGEKPYECDDCGKTFSQSCSLLEHHRIHTGEKPYQCSMCGKAFRRSSHLLRHQRIHTGDKNVQEPEQGEAWKSRMESQLENVETPMSYKCNECERSFTQNTGLIEHQKIHTGEKPYQCNACGKGFTRISYLVQHQRSHVGKNILSQ

SEQ ID NO: 15960 - protein, 545 aa, Homo Sapiens
MAREPRKNAALDAQSAEDQTGLLTVKVEKEEASALTAEVRAPCSPARGPERSRQRFRGFRYPEAAGPREALSRLRELCGQWLQPEMHSKEQILELLVLEQFLTILPGNLQSWVREQHPESGEEVVVLLEYLERQLDEPAPQVPVGDQGQELLCCKMALLTQTQGSQSSQCQPMKALFKHESLGSQPLHDRVLQVPGLAQGGCCREDAMVASRLTPGSQGLLKMEDVALTLTPGWTQLDSSQVNLYRDEKQENHSSLVSLGGEIQTKSRDLPPVKKLPEKEHGKICHLREDIAQIPTHAEAGEQEGRLQRKQKNAIGSRRHYCHECGKSFAQSSGLTKHRRIHTGEKPYECEDCGKTFIGSSALVIHQRVHTGEKPYECEECGKVFSHSSNLIKHQRTHTGEKPYECDDCGKTFSQSCSLLEHHKIHTGEKPYQCNMCGKAFRRNSHLLRHQRIHGDKNVQNPEHGESWESQGRTESQWENTEAPVSYKCNECERSFTRNRSLIEHQKIHTGEKPYQCDTCGKGFTRTSYLVQHQRSHVGKKTLSQ

SEQ ID NO: 15961 - protein, 839 aa, Homo Sapiens
MIMTESREVIDLDPPAETSQEQEDLFIVKVEEEDCTWMQEYNPPTFETFYQRFRHFQYHEASGPREALSQLRVLCCEWLRPELHTKEQILELLVLEQFLTILPEEFQPWVREHHPESGEEAVAVIENIQRELEERRQQIVACPDVLPRKMATPGAVQESCSPHPLTVDTQPEQAPQKPRLLEENALPVLQVPSLPLKDSQELTASLLSTGSQKLVKIEEVADVAVSFILEEWGHLDQSQKSLYRDDRKENYGSITSMGYESRDNMELIVKQISDDSESHWVAPEHTERSVPQDPDFAEVSDLKGMVQRWQVNPTVGKSRQNPSQKRDLDAITDISPKQSTHGERGHRCSDCGKFFLQASNFIQHRRIHTGEKPFKCGECGKSYNQRVHLTQHQRVHTGEKPYKCQVCGKAFRVSSHLVQHHSVHSGERPYGCNECGKNFGRHSHLIEHLKRHFREKSQRCSDKRSKNTKLSVKKKISEYSEADMELSGKTQRNVSQVQDFGEGCEFQGKLDRKQGIPMKEILGQPSSKRMNYSEVPYVHKKSSTGERPHKCNECGKSFIQSAHLIQHQRIHTGEKPFRCEECGKSYNQRVHLTQHQRVHTGEKPYTCPLCGKAFRVRSHLVQHQSVHSGERPFKCNECGKGFGRRSHLAGHLRLHSREKSHQCRECGEIFFQYVSLIEHQVLHMGQKNEKNGICEEAYSWNLTVIEDKKIELQEQPYQCDICGKAFGYSSDLIQHYRTHTAEKPYQCDICRENVGQCSHTKQHQKIYSSTKSHQCHECGRGFTLKSHLNQHQRIHTGEKPFQCKECGMNFSWSCSLFKHLRSHERTDPINTLSVEGSLL

SEQ ID NO: 15962 - protein, 754 aa, Homo Sapiens
MTTAGRGNLGLIPRSTAFQKQEGRLTVKQEPANQTWGQGSSLQKNYPPVCEIFRLHFRQLCYHEMSGPQEALSRLRELCRWWLMPEVHTKEQILELLVLEQFLSILPGELRTWVQLHHPESGEEAVAVVEDFQRHLSGSEEVSAPAQKQEMHFEETTALGTTKESPPTSPLSGGSAPGAHLEPPYDPGTHHLPSGDFAQCTSPVPTLPQVGNSGDQAGATVLRMVRPQDTVAYEDLSVDYTQKKWKSLTLSQRALQWNMMPENHHSMASLAGENMMKGSELTPKQEFFKGSESSNRTSGGLFGVVPGAAETGDVCEDTFKELEGQTSDEEGSRLENDFLEITDEDKKKSTKDRYDKYKEVGEHPPLSSSPVEHEGVLKGQKSYRCDECGKAFNRSSHLIGHQRIHTGEKPYECNECGKTFRQTSQLIVHLRTHTGEKPYECSECGKAYRHSSHLIQHQRLHNGEKPYKCNECAKAFTQSSRLTDHQRTHTGEKPYECNECGEAFIRSKSLARHQVLHTGKKPYKCNECGRAFCSNRNLIDHQRIHTGEKPYECSECGKAFSRSKCLIRHQSLHTGEKPYKCSECGKAFNQNSQLIEHERIHTGEKPFECSECGKAFGLSKCLIRHQRLHTGEKPYKCNECGKSFNQNSHLIIHQRIHTGEKPYECNECGKVFSYSSSLMVHQRTHTGEKPYKCNDCGKAFSDSSQLIVHQRVHTGEKPYECSECGKAFSQRSTFNHHQRTHTGEKSSGLAWSVS

SEQ ID NO: 15963 - protein, 578 aa, Homo Sapiens
MAEESRKPSAPSPPDQTPEEDLVIVKVEEDHGWDQESSLHESNPLGQEVFRLRFRQLRYQETLGPREALIQLRALCHQWLRPDLNTKEQILELLVLEQFLTILPEELQTLVKEHQLENGEEVVTLLEDLERQIDILGRPVSARVHGHRVLWEEVVHSASAPEPPNTQLQSEATQHKSPVPQESQERAMSTSQSPTRSQKGSSGDQEMTATLLTAGFQTLEKIEDMAVSLIREEWLLDPSQKDLCRDNRPENFRNMFSLGGETRSENRELASKQVISTGIQPHGETAAKCNGDVIRGLEHEEARDLLGRLERQRGNPTQERRHKCDECGKSFAQSSGLVRHWRIHTGEKPYQCNVCGKAFSYRSALLSHQDIHNKVKRYHCKECGKAFSQNTGLILHQRIHTGEKPYQCNQCGKAFSQSAGLILHQRIHSGERPYECNECGKAFSHSSHLIGHQRIHTGEKPYECDECGKTFRRSSHLIGHQRSHTGEKPYKCNECGRAFSQKSGLIEHQRIHTGERPYKCKECGKAFNGNTGLIQHLRIHTGEKPYQCNECGKAFIQRSSLIRHQRIHSGEKSESISV

SEQ ID NO: 15964 - protein, 638 aa, Homo Sapiens
MESCSVTRLECSGAISAHCSLHLPGSSDSPASASQIAGTTDAIWNEQEKAELFTDKFCQVCGVMLQFESQRISHYEGEKHAQNVSFYFQMHGEQNEVPGKKMKMHVENFQVHRYEGVDKNKFCDLCNMMFSSPLIAQSHYVGKVHAKKLKQLMEEHDQASPSGFQPEMAFSMRTYVCHICSIAFTSLDMFRSHMQGSEHQIKESIVINLVKNSRKTQDSYQNECADYINVQKARGLEAKTCFRKMEESSLETRRYREVVDSRPRHRMFEQRLPFETFRTYAAPYNISQAMEKQLPHSKKTYDSFQDELEDYIKVQKARGLDPKTCFRKMRENSVDTHGYREMVDSGPRSRMCEQRFSHEASQTYQRPYHISPVESQLPQWLPTHSKRTYDSFQDELEDYIKVQKARGLEPKTCFRKIGDSSVETHRNREMVDVRPRHRMLEQKLPCETFQTYSGPYSISQVVENQLPHCLPAHDSKQRLDSISYCQLTRDCFPEKPVPLSLNQQENNSGSYSVESEVYKHLSSENNTADHQAGHKQKHQKRKRHLEEGKERPEKEQSKHKRKKSYEDTDLDKDKSIRQRKREEDRVKVSSGKLKHRKKKKSHDVPSEKEERKHRKEKKKSVEERTEEEMLWDESILGF

SEQ ID NO: 15965 - protein, 199 aa, Homo Sapiens
MASGSGTKNLDFRRKWDKDEYEKLAEKRLTEEREKKDGKPVQPVKRELLRHRDYKVDLESKLGKTIVITKTTPQSEMGGYYCNVCDCVVKDSINFLDHINGKKHQRNLGMSMRVERSTLDQVKKRFEVNKKKMEEKQKDYDFEERMKELREEEEKAKAYKKEKQKEKKRRAEEDLTFEEDDEMAAVMGFSGFGSTKKSY

SEQ ID NO: 15966 - protein, 289 aa, Homo Sapiens
MILLQHAVLPPPKQPSPSPPMSVATRSTGTLQLPPQKPFGQEASLPLAGEEELSKGGEQDCALEELCKPLYCKLCNVTLNSAQQAQAHYQGKNHGKKLRNYYAANSCPPPARMSNVVEPAATPVVPVPPQMGSFKPGGRVILATENDYCKLCDASFSSPAVAQAHYQGKNHAKRLRLAEAQSNSFSESSELGQRRARKEGNEFKMMPNRRNMYTVQNNSAGPYFNPRSRQRIPRDLAMCVTPSGQFYCSMCNVGAGEEMEFRQHLESKQHKSKVSEQRYRNEMENLGYV

SEQ ID NO: 15967 - protein, 229 aa, Homo Sapiens
MKSSDIDQDLFTDSYCKVCSAQLISESQRVAHYESRKHASKVRLYYMLHPRDGGCPAKRLRSENGSDADMVDKNKCCTLCNMSFTSAVVADSHYQGKIHAKRLKLLLGEKTPLKTTATPLSPLKPPRMDTAPVVASPYQRRDSDRYCGLCAAWFNNPLMAQQHYDGKKHKKNAARVALLEQLGTTLDMGELRGLRRNYRCTICSVSLNSIEQYHAHLKGSKHQTNLKNK

SEQ ID NO: 15968 - protein, 170 aa, Homo Sapiens
MGKRYFCDYCDRSFQDNLHNRKKHLNGLQHLKAKKVWYDMFRDAAAILLDEQNKRPCRKFLLTGQCDFGSNCRFSHMSERDLQELSIQVEEERRAREWLLDAPELPEGHLEDWLEKRAKRLSSAPSSRAEPIRTTVFQYPVGWPPVQELPPSLRAPPPGGWPLQPRVQWG

SEQ ID NO: 15969 - protein, 573 aa, Homo Sapiens
MDAKSLTAWSRTLVTFKDVFVDFTREEWKLLDTAQQIVYRNVMLENYKNLVSLGYQLTKPDVILRLEKGEEPWLVEREIHQETHPDSETAFEIKSSVSSRSIFKDKQSCDIKMEGMARNDLWYLSLEEVWKCRDQLDKYQENPERHLRQVAFTQKKVLTQERVSESGKYGGNCLLPAQLVLREYFHKRDSHTKSLKHDLVLNGHQDSCASNSNECGQTFCQNIHLIQFARTHTGDKSYKCPDNDNSLTHGSSLGISKGIHREKPYECKECGKFFSWRSNLTRHQLIHTGEKPYECKECGKSFSRSSHLIGHQKTHTGEEPYECKECGKSFSWFSHLVTHQRTHTGDKLYTCNQCGKSFVHSSRLIRHQRTHTGEKPYECPECGKSFRQSTHLILHQRTHVRVRPYECNECGKSYSQRSHLVVHHRIHTGLKPFECKDCGKCFSRSSHLYSHQRTHTGEKPYECHDCGKSFSQSSALIVHQRIHTGEKPYECCQCGKAFIRKNDLIKHQRIHVGEETYKCNQCGIIFSQNSPFIVHQIAHTGEQFLTCNQCGTALVNTSNLIGYQTNHIRENAY

SEQ ID NO: 15970 - protein, 542 aa, Homo Sapiens
MDDPRYGMCPLKGASGCPGAERSLLVQSYFEKGPLTFRDVAIEFSLEEWQCLDSAQQGLYRKVMLENYRNLVFLAGIALTKPDLITCLEQGKEPWNIKRHEMVAKPPVICSHFPQDLWAEQDIKDSFQEAILKKYGKYGHDNLQLQKGCKSVDECKVHKEHDNKLNQCLITTQSNIFQCDPSAKVFHTFSNSNRHKIRHTRKKPFKCKKCEKSFCMLLHLTQHKRFHITENSYQCKDCGKAFNWFSTLTTHRRIHTGEKPYKCEECGKAFNRSSHLTTHKIIHTGEKPYRCEECGKAFNRSSHLTTHKRIHTGVKPYKCTECGKAFNRSSHLTTHRIIHTGEKPYKCEECGKAFNQSSTLTTHKITHAGEKPYKCEECGKAFYRFSYLTKHKTSHTGEKFYKCEECGKGFNWSSALTKHKRIHTGEKPYKCEECGKAFNESSNLTTHKMIHTGEKPYKCDECGKAFNRSSQLTAHKMIHTGEKPYKCEECGKAFNRSSTLTKHKITHTGEKSYKWEECGKDFNQSLSLIKQNNSYWRETLQM

SEQ ID NO: 15971 - protein, 436 aa, Homo Sapiens
MDSVAFEDVAVNFTQEEWALLSPSQKNLYRDVTLETFRNLASVGIQWKDQDIENLYQNLGIKLRSLVERLCGRKEGNEHRETFSQIPDCHLNKKSQTGVKPCKCSVCGKVFLRHSFLDRHMRAHAGHKRSECGGEWRETPRKQKQHGKASISPSSGARRTVTPTRKRPYECKVCGKAFNSPNLFQIHQRTHTGKRSYKCREIVRAFTVSSFFRKHGKMHTGEKRYECKYCGKPIDYPSLFQIHVRTHTGEKPYKCKQCGKAFISAGYLRTHEIRSHALEKSHQCQECGKKLSCSSSLHRHERTHSGGKLYECQKCAKVFRCPTSLQAHERAHTGERPYECNKCGKTFNYPSCFRRHKKTHSGEKPYECTRCGKAFGWCSSLRRHEMTHTGEKPFDCKQCGKVFTFSNYLRLHERTHLAGRSQCFGRRQGDHLSPGV

SEQ ID NO: 15972 - protein, 1883 aa, Homo Sapiens
MPVGRIECPSSPSFPRDISHECRVCGVTEVGLSAYAKHISGQLHKDNVDAQEREDDGKGEEEEEDYFDKELIQLIKQRKEQSRQDEPSNSNQEINSDDRRPQWRREDRIPYQDRESYSQPAWHHRGPPQRDWKWEKDGFNNTRKNSFPHSLRNGGGPRGRSGWHKGVAGGSSTWFHNHSNSGGGWLSNSGAVDWNHNGTGRNSSWLSEGTGGFSSWHMNNSNGNWKSSVRSTNNWNYSGPGDKFQPGRNRNSNCQMEDMTMLWNKKSNKSNKYSHDRYNWQRQENDKLGTVATYRGPSEGFTSDKFPSEGLLDFNFEQLESQTTKQADTATSKVSGKNGSAAREKPRRWTPYPSQKTLDLQSGLKDITGNKSEMIEKPLFDFSLITTGIQEPQTDETRNSPTQKTQKEIHTGSLNHKASSDSAASFEVVRQCPTAEKPEQEHTPNKMPSLKSPLLPCPATKSLSQKQDPKNISKNTKTNFFSPGEHSNPSNKPTVEDNHGPYISKLRSSCPHVLKGNKSTFGSQKQSGDNLNDTLRKAKEVLQCHESLQNPLLSTSKSTRNYAKASRNVEESEKGSLKIEFQVHALEDESDGETSDTEKHGTKIGTLGSATTELLSGSTRTADEKEEDDRILKTSRELSTSPCNPIVRQKESELQMTSAASPHPGLLLDLKTSLEDAQVDDSIKSHVSYETEGFESASLDAELQKSDISQPSGPLLPELSKLGFPASLQRDLTRHISLKSKTGVHLPEPNLNSARRIRNISGHRKSETEKESGLKPTLRQILNASRRNVNWEQVIQQVTKKKQELGKGLPRFGIEMVPLVQNEQEALDLDGEPDLSSLEGFQWEGVSISSSPGLARKRSLSESSVIMDRAPSVYSFFSEEGTGKENEPQQMVSPSNSLRAGQSQKATMHLKQEVTPRAASLRTGERAENVATQRRHSAQLSSDHIIPLMHLAKDLNSQERSIPPSENQNSQESNGEGNCLSSSASSALAISSLADAATDSSCTSGAEQNDGQSIRKKRRATGDGSSPELPSLERKNKRRKIKGKKERSQVDQLLNISLREEELSKSLQCMDNNLLQARAALQTAYVEVQRLLMLKQQITMEMSALRTHRIQILQGLQETYEPSEHPDQVPCSLTRERRNSRSQTSIDAALLPTPFFPLFLEPPSSHVSPSPTGASLQITTSPTFQTHGSVPAPDSSVQIKQEPMSPEQDENVNAVPPSSACNVSKELLEANREISDSCPVYPVITARLSLPESTESFHEPSQELKFSVEQRNTRNRENSPSSQSAGLSSINKEGEEPTKGNSGSEACTSSFLRLSFASETPLEKEPHSPADQPEQQAESTLTSAETRGSKKKKKLRKKKSLRAAHVPENSDTEQDVLTVKPVRKVKAGKLIKGGKVTTSTWEDSRTGREQESVRDEPDSDSSLEVLEIPNPQLEVVAIDSSESGEEKPDSPSKKDIWNSTEQNPLETSRSGCDEVSSTSEIGTRYKDGIPVSVAETQTVISSIKGSKNSSEISSEPGDDDEPTEGSFEGHQAAVNAIQIFGNLLYTCSADKTVRVYNLVSRKCIGVFEGHTSKVNCLLVTQTSGKNAALYTGSSDHTIRCYNVKSRECVEQLQLEDRVLCLHSRWRILYAGLANGTVVTFNIKNNKRLEIFECHGPRAVSCLATAQEGARKLLVVGSYDCTISVRDARNGLLLRTLEGHSKTILCMKVVNDLVFSGSSDQSVHAHNIHTGELVRIYKGHNHAVTVVNILGKVMVTACLDKFVRVYELQSHDRLQVYGGHKDMIMCMTIHKSMIYTGCYDGSIQAVRLNLMQNYRCWWHGCSLIFGVVDHLKQHLLTDHTNPNFQTLKCRWKNCDAFFTARKGSKQDAAGHIERHAEDDSKIDS

SEQ ID NO: 15973 - protein, 783 aa, Homo Sapiens
MVAKPPVMSFHFAQDLWPEQNIKDSFQKVTLRRYGKCEYENLQLRKGCKHVDECTGHKGGHNTVNQCLTATPSKIFQCNKYVKVFDKFSNSNRYKRRHTGNKHFKCKECSKSFCVLSQLTQHRRIHTRVNSYKCEECGKAFNWFSTLTKHKRIHTGEKPYKCEECGKAFNQSSQLTRHKIIHTEEKPNKCEECGKAFKQASHLTIHKIIHTGEKPYKYEECGKVFSQSSHLTTQKILHTGENLYKCKECGKAFNLFSNLTNHKRIHAGEKPYKCKECGRAFNISSNLNKQEKIHTGGKLNKCEECDKAFNRSLKLTAHKKILMEEKPYKCEECGKVFNQFSTLTRHKIIHTGEKPYKCKECGKAFNQSSNLTEHKKIHTAEKSYKCEECGKAFNQHSNLINHRKIYSGEKPYKCEECGKAFNRSSTLTRHKKIHTGEKPYKCEECDRAFSQSSNLTEHKKIHTGEKPYKCEECGKAFNRFSTLTKHKRIHTGEKPYKCEECGKAFNQSYQLTRHKIVHTKEKLNKCEEFGKAFKQSSHRTIHKIIHTGEKPYKCEEHGKVFNQSSNLTTQKIIHTGENLYKFEEHGKAFNLFSNITNHKIIYTGEKPHKCEECGKAYNRFSNLTIHKRIHTGEKPYQCAECGKAFNCSSTLNRHKIIHTGEKPYKCKECGKAFNLSSTLTAHKKIHTGEKPYKCEECGKAFNQSSNLTTHKKIHTSEKPYKCEECGKSFNQFSSLNIHKIIHTGEKPYKCGDYGRAFNLSSNLTTHKKIHTGEKPYKCEYGKT

SEQ ID NO: 15974 - protein, 913 aa, Homo Sapiens
MTKFQEMVTFKDVAVVFTEEELGLLDSVQRKLYRDVMLENFRNLLLVAHQPFKPDLISQLEREEKLLMVETETPRDGCSGRKNQQKMESIQEVTVSYFSPKELSSRQTWQQSAGGLIRCQDFLKVFQGKNSQLQEQGNSLGQVWAGIPVQISEDKNYIFTHIGNGSNYIKSQGYPSWRAHHSWRKMYLKESHNYQCRCQQISMKNHFCKCDSVSWLSHHNDKLEVHRKENYSCHDCGEDIMKVSLLNQESIQTEEKPYPCTGYRKAFSNDSSSEVHQQFHLEGKPYTYSSCGKGCNYSSLLHIHQNIEREDDIENSHLKSYQRVHTEEKPCKCGEYGENFNHCSPLNTYELIHTGEMSYRHNIYEKAFSHSLDLNSIFRVHTRDEPHEYEENENVFNQSSCLQVHQKIHTEEKLYTDIEYGKSFICSSNLDIQHRVHMEENSYNSEECGNGFSLASHFQDLQIVHTKEQPYKRYVCSNSFSHNLYLQGHPKIHIGEKPRKEHGNGFNWSSKLKDHQRVHTGQKPYKCNICGKGFNHRSVLNVHQRVHTGEKPYKCEECDKGFSRSSYLQAHQRVHTGEKPYKCEECGKGFSRNSYLQGHQRVHTGEKPYKCEECGKGFSRSSHLQGHQRVHTGEKPFKCEECGKGFSWSFNLQIHQRVHTGEKPYKCEECGKGFSKASTLLAHQRVHTGEKPYQCDECGKSFSQRSYLQSHQSVHSGERPYICEVCGKGFSQRAYLQGHQRVHTRVKPYKCEMCGKGFSQSSRLEAHRRVHTGGKPYKCEVCTKGFSESSRLQAHQRVHVEGRPYKCEQCGKGFSGYSSLQAHHRVHTGEKPYKCEVCGKGFSQRSNLQAHQRVHTGEKPYKCDACGKGFRWSSGLLIHQRVHSSDKFYKSEDYGKDYPSSENLHRNEDSVLF

SEQ ID NO: 15975 - protein, 417 aa, Homo Sapiens
MSQDSVTFADVAVNFTKEEWTLLDPAQRNLYRDVMLENSRNLAFIDWATPCKTKDATPQPDILPKRTFPEANRVCLTSISSQHSTLREDWRCPKTEEPHRQGVNNVKPPAVAPEKDESPVSICEDHEMRNHSKPTCRLVPSQGDSIRQCILTRDSSIFKYNPVLNDSQKTHENNEDDGVLGWNIQWVPCGRKTELKSSTWTGSQNTVHHIRDEIDTGANRHQRNPFGKAFREDGSLRAHNTHGREKMYDFTQCENTSRNNSIHAMQMQLYTAETNKKDCQTGATSANAPNSGSHKSHCTGEKTHKCPECGRAFFYQSFLMRHMKIHTGEKPYECGKCGKAFRYSLHLNKHLRKHVVQKKPYECEECGKVIRESSKYTHIRSHTGEKPYKCKTCGKDFAKSSGLKKHLKTHKDEKPCE

SEQ ID NO: 15976 - protein, 483 aa, Homo Sapiens
MKRHEMVAKHLVMFYYFAQHLWPEQNIRDSFQKVTLRRYRKCGYENLQLRKGCKSVVECKQHKGDYSGLNQCLKTTLSKIFQCNKYVEVFHKISNSNRHKMRHTENKHFKCKECRKTFCMLSHLTQHKRIQTRVNFYKCEAYGRAFNWSSTLNKHKRIHTGEKPYKCKECGKAFNQTSHLIRHKRIHTEEKPYKCEECGKAFNQSSTLTTHNIIHTGEIPYKCEKCVRAFNQASKLTEHKLIHTGEKRYECEECGKAFNRSSKLTEHKYIHTGEKLYKCEECGKAFNQSSTLTTHKRIHSGEKPYKCEECGKAFKQFSNLTDHKKIHTGEKPYKCEECGKAFNQLSNLTRHKVIHTGEKPYKCGECGKAFNQSSALNTHKIIHTGENPHKCRESGKVFHLSSKLSTCKKIHTGEKLYKCEECGKAFNRSSTLIGHKRIHTGEKPYKCEECGKAFNQSSTLTTHKIIHTEEKQYKCDECGKAST

SEQ ID NO: 15977 - protein, 697 aa, Homo Sapiens
MNKSLGPVSFKDVAVDFTQEEWQQLDPEQKITYRDVMLENYSNLVSVGYHIIKPDVISKLEQGEEPWIVEGEFLLQSYPDEVWQTDDLIERIQEEENKPSRQTVFIETLIEERGNVPGKTFDVETNPVPSRKIAYKNSLCDSCEKCLTSVSEYISSDGSYARMKADECSGCGKSLLHIKLEKTHPGDQAYEFNQNGEPYTLNEESLYQKIRILEKPFEYIECQKAFQKDTVFVNHMEEKPYKWNGSEIAFLQMSDLTVHQTSHMEMKPYECSECGKSFCKKSKFIIHQRTHTGEKPYECNQCGKSFCQKGTLTVHQRTHTGEKPYECNECGKNFYQKLHLIQHQRTHSGEKPYECSYCGKSFCQKTHLTQHQRTHSGERPYVCHDCGKTFSQKSALNDHQKIHTGVKLYKCSECGKCFCRKSTLTTHLRTHTGEKPYECNECGKFFSRLSYLTVHYRTHSGEKPYECNECGKTFYLNSALMRHQRVHTGEKPYECNECGKLFSQLSYLTIHHRTHSGVKPYECSECGKTFYQNSALCRHRRIHKGEKPYECYICGKFFSQMSYLTIHHRIHSGEKPYECSECGKTFCQNSALNRHQRTHTGEKAYECYECGKCFSQMSYLTIHHRIHSGEKPFECNECGKAFSRMSYLTVHYRTHSGEKPYECTECGKKFYHKSAFNSHQRIHRRGNMNVIDVGRLL

SEQ ID NO: 15978 - protein, 390 aa, Homo Sapiens
MAEIHNGGELCDFMENGEIFSEHSCLNAHMGTENTGDTYDCDEYGENFPMLHNSAPAGETLSVLNQCRKAFSLPPNVHQRTWIGDKSFEYSDCEEAFVDQSHLQANRITHNGETLYEQKQCGRAFTYSTSHAVSVKMHTVEKPYECKECGKFFRYSSYLNSHMRTHTGEKPYECKECGKCFTVSSHLVEHVRIHTGEKPYQCKECGRAFAGRSGLTKHVRIHTGEKPYECNECGKAYNRFYLLTEHFKTHTEEKPFECKVCGKSFRSSSCLKNHFRIHTGIKPYKCKECGKAFTVSSSLHNHVKIHTGEKPYECKDCGKAFATSSQLIEHIRTHTGEKPYICKECGKTFRASSHLQKHVRIHTGEKPYICNECGKAYNRFYLLTKHLKTH

SEQ ID NO: 15979 - protein, 351 aa, Homo Sapiens
MSGHPGSWEMNSVAFEDVAVNFTQEEWALLDPSQKNLYRDVMQETFRNLASIGNKGEDQSIEDQYKNSSRNLRHIISHSGNNPYGCEECGKKPCTCKQCQKTSLSVTRVHRDTVMHTGNGHYGCTICEKVFNIPSSFQIHQRNHTGEKPYECMECGKALGFSRSLNRHKRIHTGEKRYECKQCGKAFSRSSHLRDHERTHTGEKPYECKHCGKAFRYSNCLHYHERTHTGEKPYVCMECGKAFSCLSSLQGHIKAHAGEEPYPCKQCGKAFRYASSLQKHEKTHIAQKPYVCNNCGKGFRCSSSLRDHERTHTGEKPYECQKCGKAFSRASTLWKHKKTHTGEKPYKCKKM

SEQ ID NO: 15980 - protein, 623 aa, Homo Sapiens
MEAEETMECLQEFPEHHKMILDRLNEQREQDRFTDITLIVDGHHFKAHKAVLAACSKFFYKFFQEFTQEPLVEIEGVSKMAFRHLIEFTYTAKLMIQGEEEANDVWKAAEFLQMLEAIKALEVRNKENSAPLEENTTGKNEAKKRKIAETSNVITESLPSAESEPVEIEVEIAEGTIEVEDEGIETLEEVASAKQSVKYIQSTGSSDDSALALLADITSKYRQGDRKGQIKEDGCPSDPTSKQVEGIEIVELQLSHVKDLFHCEKCNRSFKLFYHFKEHMKSHSTESFKCEICNKRYLRESAWKQHLNCYHLEEGGVSKKQRTGKKIHVCQYCEKQFDHFGHFKEHLRKHTGEKPFECPNCHERFARNSTLKCHLTACQTGVGAKKGRKKLYECQVCNSVFNSWDQFKDHLVIHTGDKPNHCTLCDLWFMQGNELRRHLSDAHNISERLVTEEVLSVETRVQTEPVTSMTIIEQVGKVHVLPLLQVQVDSAQVTVEQVHPDLLQDSQVHDSHMSELPEQVQVSYLEVGRIQTEEGTEVHVEELHVERVNQMPVEVQTELLEADLDHVTPEIMNQEERESSQADAAEAAREDHEDAEDLETKPTVDSEAEKAENEDRTALPVLE

SEQ ID NO: 15981 - protein, 706 aa, Homo Sapiens
MALPSPQVLMGLPALLMGPAQHTSWPCGSAVPTLKSMVTFEDVAVYFSQEEWELLDAAQRHLYHSVMLENLELVTSLGSWHGVEGEGAHPKQNVSVEVLQVRIPNADPSTKKANSCDMCGPFLKDILHLAEHQGTQSEEKPYTCGACGRDFWLNANLHQHQKEHSGGKPFRWYKDRDALMKSSKVHLSENPFTCREGGKVILGSCDLLQLQAVDSGQKPYSNLGQLPEVCTTQKLFECSNCGKAFLKSSTLPNHLRTHSEEIPFTCPTGGNFLEEKSILGNKKFHTGEIPHVCKECGKAFSHSSKLRKHQKFHTEVKYYECIACGKTFNHKLTFVHHQRIHSGERPYECDECGKAFSNRSHLIRHEKVHTGERPFECLKCGRAFSQSSNFLRHQKVHTQVRPYECSQCGKSFSRSSALIQHWRVHTGERPYECSECGRAFNNNSNLAQHQKVHTGERPFECSECGRDFSQSSHLLRHQKVHTGERPFECCDCGKAFSNSSTLIQHQKVHTGQRPYECSECRKSFSRSSSLIQHWRIHTGEKPYECSECGKAFAHSSTLIEHWRVHTKERPYECNECGKFFSQNSILIKHQKVHTGEKPYKCSECGKFFSRKSSLICHWRVHTGERPYECSECGRAFSSNSHLVRHQRVHTQERPYECIQCGKAFSERSTLVRHQKVHTRERTYECSQCGKLFSHLCNLAQHKKIHT

SEQ ID NO: 15982 - protein, 654 aa, Homo Sapiens
MAFRDVAVDFTQDEWRLLSPAQRTLYREVMLENYSNLVSLGISFSKPELITQLEQGKETWREEKKCSPATCPADPEPELYLDPFCPPGFSSQKFPMQHVLCNHPPWIFTCLCAEGNIQPGDPGPGDQEKQQQASEGRPWSDQAEGPEGEGAMPLFGRTKKRTLGAFSRPPQRQPVSSRNGLRGVELEASPAQSGNPEETDKLLKRIEVLGFGTVNCGECGLSFSKMTNLLSHQRIHSGEKPYVCGVCEKGFSLKKSLARHQKAHSGEKPIVCRECGRGFNRKSTLIIHERTHSGEKPYMCSECGRGFSQKSNLIIHQRTHSGEKPYVCRECGKGFSQKSAVVRHQRTHLEEKTIVCSDCGLGFSDRSNLISHQRTHSGEKPYACKECGRCFRQRTTLVNHQRTHSKEKPYVCGVCGHSFSQNSTLISHRRTHTGEKPYVCGVCGRGFSLKSHLNRHQNIHSGEKPIVCKDCGRGFSQQSNLIRHQRTHSGEKPMVCGECGRGFSQKSNLVAHQRTHSGERPYVCRECGRGFSHQAGLIRHKRKHSREKPYMCRQCGLGFGNKSALITHKRAHSEEKPCVCRECGQGFLQKSHLTLHQMTHTGEKPYVCKTCGRGFSLKSHLSRHRKTTSVHHRLPVQPDPEPCAGQPSDSLYSL

SEQ ID NO: 15983 - protein, 427 aa, Homo Sapiens
MTLVTAGGAWTGPGCWHEVKDEESSSEQSISIAVSHVNTSKAGLPAQTALPCDICGPILKDILHLDEHQGTHHGLKLHTCGACGRQFWFSANLHQYQKCYSIEQPLRRDKSEASIVKNCTVSKEPHPSEKPFTCKEEQKNFQATLGGCQQKAIHSKRKTHRSTESGDAFHGEQMHYKCSECGKAFSRKDTLVQHQRIHSGEKPYECSECGKAFSRKATLVQHQRIHTGERPYECSECGKTFSRKDNLTQHKRIHTGEMPYKCNECGKYFSHHSNLIVHQRVHNGARPYKCSDCGKVFRHKSTLVQHESIHTGENPYDCSDCGKSFGHKYTLIKHQRIHTESKPFECIECGKFFSRSSDYIAHQRVHTGERPFVCSKCGKDFIRTSHLVRHQRVHTGERPYECSECGKAYSLSSHLNRHQKVHTAGRL

SEQ ID NO: 15984 - protein, 658 aa, Homo Sapiens
MTPGVRVSTDPEQVTFEDVVVGFSQEEWGQLKPAQRTLYRDVMLDTFRLLVSVGHWLPKPNVISLLEQEAELWAVESRLPQGVYPDLETRPKVKLSVLKQGISEEISNSVILVERFLWDGLWYCRGEDTEGHWEWSCESLESLAVPVAFTPVKTPVLEQWQRNGFGENISLNPDLPHQPMTPERQSPHTWGTRGKREKPDLNVLQKTCVKEKPYKCQECGKAFSHSSALIEHHRTHTGERPYECHECLKGFRNSSALTKHQRIHTGEKPYKCTQCGRTFNQIAPLIQHQRTHTGEKPYECSECGKSFSFRSSFSQHERTHTGEKPYECSECGKAFRQSIHLTQHLRIHTGEKPYQCGECGKAFSHSSSLTKHQRIHTGEKPYECHECGKAFTQITPLIQHQRTHTGEKPYECGECGKAFSQSTLLTEHRRIHTGEKPYGCNECGKTFSHSSSLSQHERTHTGEKPYECSQCGKAFRQSTHLTQHQRIHTGEKPYECNDCGKAFSHSSSLTKHQRIHTGEKPYECNQCGRAFSQLAPLIQHQRIHTGEKPYECNQCGRAFSQSSLLIEHQRIHTKEKPYGCNECGKSFSHSSSLSQHERTHTGEKPYECHDCGKSFRQSTHLTQHRRIHTGEKPYACRDCGKAFTHSSSLTKHQRTHTG

SEQ ID NO: 15985 - protein, 540 aa, Homo Sapiens
MDSVAFEDVDVNFTQEEWALLDPSQKNLYRDVMWETMRNLASIGKKWKDQNIKDHYKHRGRNLRSHMLERLYQTKDGSQRGGIFSQFANQNLSKKIPGVKLCESIVYGEVSMGQSSLNRHIKDHSGHEPKEYQEYGEKPDTRNQCWKPFSSHHSFRTHEIIHTGEKLYDCKECGKTFFSLKRIRRHIITHSGYTPYKCKVCGKAFDYPSRFRTHERSHTGEKPYECQECGKAFTCITSVRRHMIKHTGDGPYKCKVCGKPFHSLSSFQVHERIHTGEKPFKCKQCGKAFSCSPTLRIHERTHTGEKPYECKQCGKAFSYLPSLRLHERIHTGEKPFVCKQCGKAFRSASTFQIHERTHTGEKPYECKECGEAFSCIPSMRRHMIKHTGEGPYKCKVCGKPFHSLSPFRIHERTHTGEKPYVCKHCGKAFVSSTSIRIHERTHTGEKPYECKQCGKAFSYLNSFRTHEMIHTGEKPFECKRCGKAFRSSSSFRLHERTHTGQKPYHCKECGKAYSCRASFQRHMLTHAEDGPPYKCMWESL

SEQ ID NO: 15986 - protein, 207 aa, Homo Sapiens
MNVARFLVEKHTLHVIIDFILSKVSNQQSNLAQHQRVYTGEKPYKCNEWGKALSGKSSLFYHQAIHGVGKLCKCNDCHKVFSNATTIANHWRIHNEDRSYKCNKCGKIFRHRSYLAVYQRTHTGEKPYKYHDCGKVFSQASSYAKHRRIHTGEKPHKCDDCGKVLTSRSHLIRHQRIHTGQKSYKCLKCGKVFSLWALHAEHQKIHF

SEQ ID NO: 15987 - protein, 262 aa, Homo Sapiens
MKRHEMVVAKHSALCSRFAQDLWLEQNIKDSFQKVTLSRYGKYGHKNLQLRKGCKSVDECKGHQGGFNGLNQCLKITTSKIFQCNKYVKVMHKFSNSNRHKIRHTENKHFRCKECDKSLCMLSRLTQHKKIHTRENFYKCEECGKTFNWSTNLSKPKKIHTGEKPYKCEVCGKAFHQSSILTKHKIIRTGEKPYKCAHCGKAFKQSSHLTRHKIIHTEEKPYKCEQCGKVFKQSPTLTKHQIIYTGEEPYKCEECGKAFNLS

SEQ ID NO: 15988 - protein, 642 aa, Homo Sapiens
MDSVSFEDVAVNFTLEEWALLDSSQKKLYEDVMQETFKNLVCLGKKWEDQDIEDDHRNQGKNRRCHMVERLCESRRGSKCGETTSQMPNVNINKETFTGAKPHECSFCGRDFIHHSSLNRHMRSHTGQKPNEYQEYEKQPCKCKAVGKTFSYHHCFRKHERTHTGVKPYECKQCGKAFIYYQPFQRHERTHAGQKPYECKQCGKTFIYYQSFQKHAHTGKKPYECKQCGKAFICYQSFQRHKRTHTGEKPYECKQCGKAFSCPTYFRTHERTHTGEKPYKCKECGKAFSFLSSFRRHKRTHSGEKPYECKECGKAFFYSASFRAHVIIHTGARPYKCKECGKAFNSSNSCRVHERTHIGEKPYECKRCGKSFSWSISLRLHERTHTGEKPYECKQCHKTFSFSSSLREHETTHTGEKPYECKQCGKTFSFSSSLQRHERTHNAEKPYECKQCGKAFRCSSYFRIHERSHTGEKPYECKQCGKVFIRSSSFRLHERTHTGEKPYECKLCGKTFSFSSSLREHEKIHTGNKPFECKQCGKAFLRSSQIRLHERTHTGEKPYQCKQCGKAFISSSKFRMHERTHTGEKPYRCKQCGKAFRFSSSVRIHERSHTGEKPYECKQCGKAFISSSHFRLHERTHMGEKV

SEQ ID NO: 15989 - protein, 457 aa, Homo Sapiens
MSQGSVTFRDVAIDFSQEEWKWLQPAQRDLYRCVMLENYGHLVSLGLSISKPDVVSLLEQGKEPWLGKREVKRDLFSVSESSGEIKDFSPKNVIYDDSSQYLIMERILSQGPVYSSFKGGWKCKDHTEMLQENQGCIRKVTVSHQEALAQHMNISTVERPYGCHECGKTFGRRFSLVLHQRTHTGEKPYACKECGKTFSQISNLVKHQMIHTGKKPHECKDCNKTFSYLSFLIEHQRTHTGEKPYECTECGKAFSRASNLTRHQRIHIGKKQYICRKCGKAFSSGSELIRHQITHTGEKPYECIECGKAFRRFSHLTRHQSIHTTKTPYECNECRKAFRCHSFLIKHQRIHAGEKLYECDECGKVFTWHASLIQHTKSHTGEKPYACAECDKAFSRSFSLILHQRTHTGEKPYVCKVCNKSFSWSSNLAKHQRTHTLDNPYEYENSFNYHSFLTEHQ

SEQ ID NO: 15990 - protein, 474 aa, Homo Sapiens
MELLTFRDVAIEFSPEEWKCLDPDQQNLYRDVMLENYRNLVSLGVAISNPDLVTCLEQRKEPYNVKIHKIVARPPAMCSHFTQDHWPVQGIEDSFHKLILRRYEKCGHDNLQLRKGCKSLNECKLQKGGYNEFNECLSTTQSKILQCKASVKVVSKFSNSNKRKTRHTGEKHFKECGKSFQKFSHLTQHKVIHAGEKPYTCEECGKAFKWSLIFNEHKRIHTGEKPFTCEECGSIFTTSSHFAKHKIIHTGEKPYKCEECGKAFNRFTTLTKHKRIHAGEKPITCEECRKIFTSSSNFAKHKRIHTGEKPYKCEECGKAFNRSTTLTKHKRIHTGEKPYTCEECGKAFRQSSKLNEHKKVHTGERPYKCDECGKAFGRSRVLNEHKKIHTGEKPYKCEECGKAFRRSTDRSQHKKIHSADKPYKCKECDKAFKQFSLLSQHKKIHTVDKPYKCKDCDKAFKRFSHLNKHKKIHT

SEQ ID NO: 15991 - protein, 1687 aa, Homo Sapiens
MTDPLLDSQPASSTGEMDGLCPELLLIPPPLSNRGILGPVQSPCPSRDPAPIPTEPGCLLVEATATEEGPGNMEIIVETVAGTLTPGAPGETPAPKLPPGEREPSQEAGTPLPGQETAEEENVEKEEKSDTQKDSQKAVDKGQGAQRLEGDVVSGTESLFKTHMCPECKRCFKKRTHLVEHLHLHFPDPSLQCPNCQKFFTSKSKLKTHLLRELGEKAHHCPLCHYSAVERNALNRHMASMHEDISNFYSDTYACPVCREEFRLSQALKEHLKSHTAAAAAEPLPLRCFQEGCSYAAPDRKAFIKHLKETHGVRAVECRHHSCPMLFATAEAMEAHHKSHYAFHCPHCDFACSNKHLFRKHKKQGHPGSEELRCTFCPFATFNPVAYQDHVGKMHAHEKIHQCPECNFATAHKRVLIRHMLLHTGEKPHKCELCDFTCRDVSYLSKHMLTHSNTKDYMCTECGYVTKWKHYLRVHMRKHAGDLRYQCNQCSYRCHRADQLSSHKLRHQGKSLMCEVCAFACKRKYELQKHMASQHHPGTPAPLYPCHYCSYQSRHKQAVLSHENCKHTRLREFHCALCDYRTFSNTTLLFHKRKAHGYVPGDQAWQLRYASQEPEGAMQGPTPPPDSEPSNQLSARPEGPGHEPGTVVDPSLDQALPEMSEEVNTGRQEGSEAPHGGDLGGSPSPAEVEEGSCTLHLEALGVELESVTEPPLEEVTETAPMEFRPLGLEGPDGLEGPELSSFEGIGTSDLSAEENPLLEKPVSEPSTNPPSLEEAPNNWVGTFKTTPPAETAPLPPLPESESLLKALRRQDKEQAEALVLEGRVQMVVIQGEGRAFRCPHCPFITRREKALNLHSRTGCQGRREPLLCPECGASFKQQRGLSTHLLKKCPVLLRKNKGLPRPDSPIPLQPVLPGTQASEDTESGKPPPASQEAELLLPKDAPLELPREPEETEEPLATVSGSPVPPAGNSLPTEAPKKHCFDPVPPAGNSSPTEAPKKHHLDPVPPAGNSSPTEALKKHRFEQGKFHCNSCPFLCSRLSSITSHVAEGCRGGRGGGGKRGTPQTQPDVSPLSNGDSAPPKNGSTESSSGDGDTVLVQKQKGARFSCPTCPFSCQQERALRTHQIRGCPLEESGELHCSLCPFTAPAATALRLHQKRRHPTAAPARGPRPHLQCGDCGFTCKQSRCMQQHRRLKHEGVKPHQCPFCDFSTTRRYRLEAHQSRHTGIGRIPCSSCPQTFGTNSKLRLHRLRVHDKTPTHFCPLCDYSGYLRHDITRHVNSCHQGTPAFACSQCEAQFSSETALKQHALRRHPEPAQPAPGSPAETTEGPLHCSRCGLLCPSPASLRGHTRKQHPRLECGACQEAFPSRLALDEHRRQQHFSHRCQLCDFAARERVGLVKHYLEQHEETSAAVAASDGDGDAGQPPLHCPFCDFTCRHQLVLDHHVKGHGGTRLYKCTDCAYSTKNRQKITWHSRIHTGEKPYHCHLCPYACADPSRLKYHMRIHKEERKYLCPECGYKCKWVNQLKYHMTKHTGLKPYQCPECEYCTNRADALRVHQETRHREARAFMCEQCGKAFKTRFLLRTHLRKHSEAKPYVCNVCHRAFRWAAGLRHHALTHTDRHPFFCRLCNYKAKQKFQVVKHVRRHHPDQADPNQGVGKDPTTPTVHLHDVQLEDPSPPAPAAPHTGPEG

SEQ ID NO: 15992 - protein, 638 aa, Homo Sapiens
MLLAQINRDSQGMTEFPGGGMEAQHVTLCLTEAVTVADGDNLENMEGVSLQAVTLADGSTAYIQHNSKDAKLIDGQVIQLEDGSAAYVQHVPIPKSTGDSLRLEDGQAVQLEDGTTAFIHHTSKDSYDQSALQAVQLEDGTTAYIHHAVQVPQSDTILAIQADGTVAGLHTGDATIDPDTISALEQYAAKVSIDGSESVAGTGMIGENEQEKKMQIVLQGHATRVTAKSQQSGEKAFRCEYDGCGKLYTTAHHLKVHERSHTGDRPYQCEHAGCGKAFATGYGLKSHVRTHTGEKPYRCSEDNCTKSFKTSGDLQKHIRTHTGERPFKCPFEGCGRSFTTSNIRKVHVRTHTGERPYYCTEPGCGRAFASATNYKNHVRIHTGEKPYVCTVPGCDKRFTEYSSLYKHHVVHTHSKPYNCNHCGKTYKQISTLAMHKRTAHNDTEPIEEEQEAFFEPPPGQGEDVLKGSQITYVTGVEGDDVVSTQVATVTQSGLSQQVTLISQDGTQHVNISQADMQAIGNTITMVTQDGTPITVPAHDAVISSAGTHSVAMVTAEGTEGEQVAIVAQDLAAFHTASSEMGHQQHSHHLVTTETRPLTLVATSNGTQIAVQLGEQPSLEEAIRIASRIQQGETPGLDD

SEQ ID NO: 15993 - protein, 292 aa, Homo Sapiens
MSHLSQQRIYSGENPFACKVCGKVFSHKSNLTEHEHFHTREKPFECNECGKAFSQKQYVIKHQNTHTGEKLFECNECGKSFSQKENLLTHQKIHTGEKPFECKDCGKAFIQKSNLIRHQRTHTGEKPFVCKECGKTFSGKSNLTEHEKIHIGEKPFKCSECGTAFGQKKYLIKHQNIHTGEKPYECNECGKAFSQRTSLIVHVRIHSGDKPYECNVCGKAFSQSSSLTVHVRSHTGEKPYGCNECGKAFSQFSTLALHLRIHTGKKPYQCSECGKAFSQKSHHIRHQKIHTH

SEQ ID NO: 15994 - protein, 794 aa, Homo Sapiens
MNIDDKLEGLFLKCGGIDEMQSSRTMVVMGGVSGQSTVSGELQDSVLQDRSMPHQEILAADEVLQESEMRQQDMISHDELMVHEETVKNDEEQMETHERLPQGLQYALNVPISVKQEITFTDVSEQLMRDKKQIREPVDLQKKKKRKQRSPAKILTINEDGSLGLKTPKSHVCEHCNAAFRTNYHLQRHVFIHTGEKPFQCSQCDMRFIQKYLLQRHEKIHTGEKPFRCDECGMRFIQKYHMERHKRTHSGEKPYQCEYCLQYFSRTDRVLKHKRMCHENHDKKLNRCAIKGGLLTSEEDSGFSTSPKDNSLPKKKRQKTEKKSSGMDKESALDKSDLKKDKNDYLPLYSSSTKVKDEYMVAEYAVEMPHSSVGGSHLEDASGEIHPPKLVLKKINSKRSLKQPLEQNQTISPLSTYEESKVSKYAFELVDKQALLDSEGNADIDQVDNLQEGPSKPVHSSTNYDDAMQFLKKKRYLQAASNNSREYALNVGTIASQPSVTQAAVASVIDESTTASILESQALNVEIKSNHDKNVIPDEVLQTLLDHYSHKANGQHEISFSVADTEVTSSISINSSEVPEVTPSENVGSSSQASSSDKANMLQEYSKFLQQALDRTSQNDAYLNSPSLNFVTDNQTLPNQPAFSSIDKQVYATMPINSFRSGMNSPLRTTPDKSHFGLIVGDSQHSFPFSGDETNHASATSTQDFLDQVTSQKKAEAQPVHQAYQMSSFEQPFRAPYHGSRAGIATQFSTANGQVNLRGPGTSAEFSEFPLVNVNDNRAGMTSSPDATTGQTFG

SEQ ID NO: 15995 - protein, 437 aa, Homo Sapiens
MAAATLRTPTQGTVTFEDVAVHFSWEEWGLLDEAQRCLYRDVMLENLALLTSLDVHHQKQHLGEKHFRSNVGRALFVKTCTFHVSGEPSTCREVGKDFLAKLGFLHQQAAHTGEQSNSKSDGGAISHRGKTHYNCGEHTKAFSGKHTLVQQQRTLTTERCYICSECGKSFSKSYSLNDHWRLHTGEKPYECRECGKSFRQSSSLIQHRRVHTAVRPHECDECGKLFSNKSNLIKHRRVHTGERPYECSECGKSFSQRSALLQHRGVHTGERPYECSECGKFFTYHSSLIKHQKVHSGSRPYECSECGKSFSQNSSLIEHHRVHTGERPYKCSECGKSFSQRSALLQHRGVHTGERPYECSECGKFFPYSSSLRKHQRVHTGSRPYECSECGKSFTQNSGLIKHRRVHTGEKPYECTECGKSFSHNSSLIKHQRIHSR

SEQ ID NO: 15996 - protein, 538 aa, Homo Sapiens
MTTFKEAVTFKDVAVVFTEEELGLLDPAQRKLYRDVMLENFRNLLSVGHQPFHQDTCHFLREEKFWMMGTATQREGNSGGKIQTELESVPEAGAHEEWSCQQIWEQIAKDLTRSQDSIINNSQFFENGDVPSQVEAGLPTIHTGQKPSQGGKCKQSISDVPIFDLPQQLYSEEKSYTCDECGKSICYISALHVHQRVHVGEKLFMCDVCGKEFSQSSHLQTHQRVHTGEKPFKCEQCGKGFSRRSALNVHRKLHTGEKPYICEACGKAFIHDSQLKEHKRIHTGEKPFKCDICGKTFYFRSRLKSHSMVHTGEKPFRCDTCDKSFHQRSALNRHCMVHTGEKPYRCEQCGKGFIGRLDFYKHQVVHTGEKPYNCKECGKSFRWSSCLLNHQRVHSGEKSFKCEECGKGFYTNSQLSSHQRSHSGEKPYKCEECGKGYVTKFNLDLHQRVHTGERPYNCKECGKNFSRASSILNHKRLHCQKKPFKCEDCGKRLVHRTYRKDQPRDYSGENPSKCEDCGRRYKRRLNLDILLSLFLNDT

SEQ ID NO: 15997 - protein, 506 aa, Homo Sapiens
MPANGTSPQRFPALIPGEPGRSFEGSVSFEDVAVDFTRQEWHRLDPAQRTMHKDVMLETYSNLASVGLCVAKPEMIFKLERGEELWILEEESSGHGYSGSLSLLCGNGSVGDNALRHDNDLLHHQKIQTLDQNVEYNGCRKAFHEKTGFVRRKRTPRGDKNFECHECGKAYCRKSNLVEHLRIHTGERPYECGECAKTFSARSYLIAHQKTHTGERPFECNECGKSFGRKSQLILHTRTHTGERPYECTECGKTFSEKATLTIHQRTHTGEKPYECSECGKTFRVKISLTQHHRTHTGEKPYECGECGKNFRAKKSLNQHQRIHTGEKPYECGECGKFFRMKMTLNNHQRTHTGEKPYQCNECGKSFRVHSSLGIHQRIHTGEKPYECNECGNAFYVKARLIEHQRMHSGEKPYECSECGKIFSMKKSLCQHRRTHTGEKPYECSECGNAFYVKVRLIEHQRIHTGERPFECQECGKAFCRKAHLTEHQRTHIGWSWRCTMKKASH

SEQ ID NO: 15998 - protein, 682 aa, Homo Sapiens
MPSLRTRREEAEMELSVPGPSPWTPAAQARVRDAPAVTHPGSAACGTPCCSDTELEAICPHYQQPDCDTRTEDKEFLHKEDIHEDLESQAEISENYAGDVSQVPELGDLCDDVSERDWGVPEGRRLPQSLSQEGDFTPAAMGLLRGPLGEKDLDCNGFDSRFSLSPNLMACQEIPTEERPHPYDMGGQSFQHSVDLTGHEGVPTAESPLICNECGKTFQGNPDLIQRQIVHTGEASFMCDDCGKTFSQNSVLKNRHRSHMSEKAYQCSECGKAFRGHSDFSRHQSHHSSERPYMCNECGKAFSQNSSLKKHQKSHMSEKPYECNECGKAFRRSSNLIQHQRIHSGEKPYVCSECGKAFRRSSNLIKHHRTHTGEKPFECGECGKAFSQSAHLRKHQRVHTGEKPYECNDCGKPFSRVSNLIKHHRVHTGEKPYKCSDCGKAFSQSSSLIQHRRIHTGEKPHVCNVCGKAFSYSSVLRKHQIIHTGEKPYRCSVCGKAFSHSSALIQHQGVHTGDKPYACHECGKTFGRSSNLILHQRVHTGEKPYECTECGKTFSQSSTLIQHQRIHNGLKPHECNQCGKAFNRSSNLIHHQKVHTGEKPYTCVECGKGFSQSSHLIQHQIIHTGERPYKCSECGKAFSQRSVLIQHQRIHTGVKPYDCAACGKAFSQRSKLIKHQLIHTRE

SEQ ID NO: 15999 - protein, 818 aa, Homo Sapiens
MALTQVRLTFRDVAIEFSQEEWKCLDPAQRILYRDVMLENYWNLVSLGLCHFDMNIISMLEEGKEPWTVKSCVKIARKPRTPECVKGVVTDIPPKCTIKDLLPKEKSSTEAVFHTVVLERHESPDIEDFSFKEPQKNVHDFECQWRDDTGNYKGVLMAQKEGKRDQRDRRDIENKLMNNQLGVSFHSHLPELQLFQGEGKMYECNQVEKSTNNGSSVSPLQQIPSSVQTHRSKKYHELNHFSLLTQRRKANSCGKPYKCNECGKAFTQNSNLTSHRRIHSGEKPYKCSECGKTFTVRSNLTIHQVIHTGEKPYKCHECGKVFRHNSYLATHRRIHTGEKPYKCNECGKAFRGHSNLTTHQLIHTGEKPFKCNECGKLFTQNSHLISHWRIHTGEKPYKCNECGKAFSVRSSLAIHQTIHTGEKPYKCNECGKVFRYNSYLGRHRRVHTGEKPYKCNECGKAFSMHSNLATHQVIHTGTKPFKCNECSKVFTQNSQLANHRRIHTGEKPYKCNECGKAFSVRSSLTTHQAIHSGEKPYKCIECGKSFTQKSHLRSHRGIHSGEKPYKCNECGKVFAQTSQLARHWRVHTGEKPYKCNDCGRAFSDRSSLTFHQAIHTGEKPYKCHECGKVFRHNSYLATHRRIHTGEKPYKCNECGKAFSMHSNLTTHKVIHTGEKPYKCNQCGKVFTQNSHLANHQRTHTGEKPYRCNECGKAFSVRSSLTTHQAIHTGKKPYKCNECGKVFTQNAHLANHRRIHTGEKPYRCTECGKAFRVRSSLTTHMAIHTGEKRYKCNECGKVFRQSSNLASHHRMHTGEKPYK

SEQ ID NO: 16000 - protein, 485 aa, Homo Sapiens
MATEPKKAAAQNSPEDEGLLIVKIEEEEFIHGQDTCLQRSELLKQELCRQLFRQFCYQDSPGPREALSRLRELCCQWLKPEIHTKEQILELLVLEQFLTILPGDLQAWVHEHYPESGEEAVTILEDLERGTDEAVLQVQAHEHGQEIFQKKVSPPGPALNVKLQPVETKAHFDSSEPQLLWDCDNESENSRSMPKLEIFEKIESQRIISGRISGYISEASGESQDICKSAGRVKRQWEKESGESQRLSSAQDEGFGKILTHKNTVRGEIISHDGCERRLNLNSNEFTHQKSCKHGTCDQSFKWNSDFINHQIIYAGEKNHQYGKSFKSPKLAKHAAVFSGDKTHQCNECGKAFRHSSKLARHQRIHTGERCYECNECGKSFAESSDLTRHRRIHTGERPFGCKECGRAFNLNSHLIRHQRIHTREKPYECSECGKTFRVSSHLIRHFRIHTGEKPYECSECGRAFSQSSNLSQHQRIHMRENLLM

SEQ ID NO: 16001 - protein, 603 aa, Homo Sapiens
MSPGLLTTRKEALMAFRDVAVAFTQKEWKLLSSAQRTLYREVMLENYSHLVSLGIAFSKPKLIEQLEQGDEPWREENEHLLDLCPEPRTEFQPSFPHLVAFSSSQLLRQYALSGHPTQIFPSSSAGGDFQLEAPRCSSEKGESGETEGPDSSLRKRPSRISRTFFSPHQGDPVEWVEGNREGGTDLRLAQRMSLGGSDTMLKGADTSESGAVIRGNYRLGLSKKSSLFSHQKHHVCPECGRGFCQRSDLIKHQRTHTGEKPYLCPECGRRFSQKASLSIHQRKHSGEKPYVCRECGRHFRYTSSLTNHKRIHSGERPFVCQECGRGFRQKIALLLHQRTHLEEKPFVCPECGRGFCQKASLLQHQSSHTGERPFLCLECGRSFRQQSLLLSHQVTHSGEKPYVCAECGHSFRQKVTLIRHQRTHTGEKPYLCPQCGRGFSQKVTLIGHQRTHTGEKPYLCPDCGRGFGQKVTLIRHQRTHTGEKPYLCPKCGRAFGFKSLLTRHQRTHSEEELYVDRVCGQGLGQKSHLISDQRTHSGEKPCICDECGRGFGFKSALIRHQRTHSGEKPYVCRECGRGFSQKSHLHRHRRTKSGHQLLPQEVF

SEQ ID NO: 16002 - protein, 662 aa, Homo Sapiens
MNLTEDYMVFEDVAIHFSQEEWGILNDVQRHLHSDVMLENFALLSSVGCWHGAKDEEAPSKQCVSVGVSQVTTLKPALSTQKAQPCETCSSLLKDILHLAEHDGTHPKRTAKLYLHQKEHLREKLTRSDEGRPSFVNDSVHLAKRNLTCMQGGKDFTGDSDLQQQALHSGWKPHRDTHGVEAFQSGQNNYSCTQCGKDFCHQHTLFEHQKIHTEERPYECSECGKLFRYNSDLIKHQRNHTGERPYKCSECGKAFSLKYNVVQHQKIHTGERPYECSECGKAFLRKSHLLQHQRIHTRPRPYVCSECGKAFLTQAHLVGHQKIHTGERPYGCNECGKYFMYSSALIRHQKVHTGERPFYCCECGKFFMDSCTLIIHQRVHTGEKPYECNECGKFFRYRSTLIRHQKVHTGEKPYECSECGKFFMDTSTLIIHQRVHTGEKPYECNKCGKFFRYCFTLNRHQRVHSGERPYECSECGKFFVDSCTLKSHQRVHTGERPFECSICGKSFRCRSTLDTHQRIHTGERPYECSECGKFFRHNSNHIRHRRNHFGERSFECTECGRVFSQNSHLIRHQKVHTRERTYKCSKCGKFFMDSSTLISHERVHTGEKPYECSECGKVFRYNSSLIKHRRIHTGERPYQCSECGRVFNQNSHLIQHQKVHTR

SEQ ID NO: 16003 - protein, 407 aa, Homo Sapiens
MAAKMEITLSSNTEASSKQERHIIAKLEEKRGPPLQKNCPDPELCRQSFRRFCYQEVSGPQEALSQLRQLCRQWLQPELHTKEQILELLVMEQFLTILPPEIQARVRHRCPMSSKEIVTLVEDFHRASKKPKQWVAVCMQGQKVLLEKTGSQLGEQELPDFQPQTPRRDLRESSPAEPSQAGAYDRLSPHHWEKSPLLQEPTPKLAGTEAPRMRSDNKENPQQEGAKGAKPCAVSAGRSKGNGLQNPEPRGANMSEPRLSRRQVSSPNAQKPFAHYQRHCRVEYISSPLKSHPLRELKKSKGGKRSLSNRLQHLGHQPTRSAKKPYKCDDCGKSFTWNSELKRHKRVHTGERPYTCGECGNCFGRQSTLKLHQRIHTGEKPYQCGQCGKSFRQSSNLHQHHRLHHGD

SEQ ID NO: 16004 - protein, 711 aa, Homo Sapiens
MPADVNLSQKPQVLGPEKQDGSCEASVSFEDVTVDFSREEWQQLDPAQRCLYRDVMLELYSHLFAVGYHIPNPEVIFRMLKEKEPRVEEAEVSHQRCQEREFGLEIPQKEISKKASFQKDMVGEFTRDGSWCSILEELRLDADRTKKDEQNQIQPMSHSAFFNKKTLNTESNCEYKDPGKMIRTRPHLASSQKQPQKCCLFTESLKLNLEVNGQNESNDTEQLDDVVGSGQLFSHSSSDACSKNIHTGETFCKGNQCRKVCGHKQSLKQHQIHTQKKPDGCSECGGSFTQKSHLFAQQRIHSVGNLHECGKCGKAFMPQLKLSVYLTDHTGDIPCICKECGKVFIQRSELLTHQKTHTRKKPYKCHDCGKAFFQMLSLFRHQRTHSREKLYECSECGKGFSQNSTLIIHQKIHTGERQYACSECGKAFTQKSTLSLHQRIHSGQKSYVCIECGQAFIQKAHLIVHQRSHTGEKPYQCHNCGKSFISKSQLDIHHRIHTGEKPYECSDCGKTFTQKSHLNIHQKIHTGERHHVCSECGKAFNQKSILSMHQRIHTGEKPYKCSECGKAFTSKSQFKEHQRIHTGEKPYVCTECGKAFNGRSNFHKHQITHTRERPFVCYKCGKAFVQKSELITHQRTHMGEKPYECLDCGKSFSKKPQLKVHQRIHTGERPYVCSECGKAFNNRSNFNKHQTTHTRDKSYKCSYSVKGFTKQ

SEQ ID NO: 16005 - protein, 549 aa, Homo Sapiens
MPVDLGQALGLLPSLAKAEDSQFSESDAALQEELSSPETARQLFRQFRYQVMSGPHETLKQLRKLCFQWLQPEVHTKEQILEILMLEQFLTILPGEIQMWVRKQCPGSGEEAVTLVESLKGDPQRLWQWISIQVLGQDILSEKMESPSCQVGEVEPHLEVVPQELGLENSSSGPGELLSHIVKEESDTEAELALAASQPARLEERLIRDQDLGASLLPAAPQEQWRQLDSTQKEQYWDLMLETYGKMVSGAGISHPKSDLTNSIEFGEELAGIYLHVNEKIPRPTCIGDRQENDKENLNLENHRDQELLHASCQASGEVPSQASLRGFFTEDEPGCFGEGENLPEALQNIQDEGTGEQLSPQERISEKQLGQHLPNPHSGEMSTMWLEEKRETSQKGQPRAPMAQKLPTCRECGKTFYRNSQLIFHQRTHTGETYFQCTICKKAFLRSSDFVKHQRTHTGEKPCKCDYCGKGFSDFSGLRHHEKIHTGEKPYKCPICEKSFIQRSNFNRHQRVHTGEKPYKCSHCGKSFSWSSSLDKHQRSHLGKKPFQ

SEQ ID NO: 16006 - protein, 692 aa, Homo Sapiens
MRACAGSTREAGSGAQDLSTLLCLEESMEEQDEKPPEPPKACAQDSFLPQEIIIKVEGEDTGSLTIPSQEGVNFKIVTVDFTREEQGTWNPAQRTLDRDVILENHRDLVSWDLATAVGKKDSTSKQRIFDEEPANGVKIERFTRDDPWLSSCEEVDDCKDQLEKQQEKQEILLQEVAFTQRKAVIHERVCKSDETGEKSGLNSSLFSSPVIPIRNHFHKHVSHAKKWHLNAAVNSHQKINENETLYENNECGKPPQSIHLIQFTRTQTKDKCYGFSDRIQSFCHGTPLHIHEKIHGGGKTFDFKECGQVLNPKISHNEQQRIPFEESQYKCSETSHSSSLTQNMRNNSEEKPFECNQCGKSFSWSSHLVAHQRTHTGEKPYECSECGKSFSRSSHLVSHQRTHTGEKPYRCNQCGKSFSQSYVLVVHQRTHTGEKPYECNQCGKSFRQSYKLIAHQRTHTGEKPYECNQCGKSFIQSYKLIAHQRIHTGEKPYECNQCGKSFSQSYKLVAHQRTHTGEKPFECNQCGKSFSWSSQLVAHQRTHTGEKPYECSECGKSFNRSSHLVMHQRIHTGEKPYECNQCGKSFSQSYVLVVHQRTHTGEKPYECSQCGKSFRQSSCLTQHQRTHTGEKPFECNQCGKTFSLSARLIVHQRTHTGEKPFTCIQCGKAFINSYKLIRHQATHTEEKLYECN

SEQ ID NO: 16007 - protein, 571 aa, Homo Sapiens
MPQVTFNDVAIDFTHEEWGWLSSAQRDLYKDVMVQNYENLVSVAGLSVTKPYVITLLEDGKEPWMMEKKLSKGMIPDWESRWENKELSTKKDNYDEDSPQTVIIEKVVKQSYEFSNSKKNLEYIEKLEGKHGSQVDHFRPAILTSRESPTADSVYKYNIFRSTFHSKSTLSEPQKISAEGNSHKYDILKKNLPKKSVIKNEKVNGGKKLLNSNKSGAAFSQGKSLTLPQTCNREKIYTCSECGKAFGKQSILNRHWRIHTGEKPYECRECGKTFSHGSSLTRHLISHSGEKPYKCIECGKAFSHVSSLTNHQSTHTGEKPYECMNCGKSFSRVSHLIEHLRIHTQEKLYECRICGKAFIHRSSLIHHQKIHTGEKPYECRECGKAFCCSSHLTRHQRIHTMEKQYECNKCLKVFSSLSFLVQHQSIHTEEKPFECQKCRKSFNQLESLNMHLRNHIRLKPYECSICGKAFSHRSSLLQHHRIHTGEKPYECIKCGKTFSCSSNLTVHQRIHTGEKPYKCNECGKAFSKGSNLTAHQRVHNGEKPNSVVSVEKPLDYMNHYTCEKSYRRETV

SEQ ID NO: 16008 - protein, 639 aa, Homo Sapiens
MTPASASGEDSGSFYSWQKAKREQGLVTFEDVAVDFTQEEWQYLNPPQRTLYRDVMLETYSNLVFVGQQVTKPNLILKLEVEECPAEGKIPFWNFPEVCQVDEQIERQHQDDQDKCLLMQVGFSDKKTIITKSARDCHEFGNILHLSTNLVASIQRPDKHESFGNNMVDNLDLFSRSSAENKYDNGCAKLFFHTEYEKTNPGMKPYGYKECGKGLRRKKGLSLHQRIKNGEKPFECTACRKTFSKKSHLIVHWRTHTGEKPFGCTECGKAFSQKSQLIIHLRTHTGERPFECPECGKAFREKSTVIIHYRTHTGEKPYECNECGKAFTQKSNLIVHQKTHTGEKTYECTKCGESFIQKLDLIIHHSTHTGKKPHECNECKKTFSDKSTLIIHQRTHTGEKPHKCTECGKSFNEKSTLIVHQRTHTGEKPYECDVCGKTFTQKSNLGVHQRTHSGEKPFECNECEKAFSQKSYLMLHQRGHTGEKPYECNECEKAFSQKSYLIIHQRTHTEEKPYKCNECGKAFREKSKLIIHQRIHTGEKPYECPVCWKAFSQKSQLIIHQRTHTGEKPYACTECGKAFREKSTFTVHQRTHTGEKPYKCTECGKAFTQKSNLIVHQRTHAGKKAHGRGHTRKSKFMAH

SEQ ID NO: 16009 - protein, 751 aa, Homo Sapiens
MEDLSSPDSTLLQGGHNLLSSASFQEAVTFKDVIVDFTQEEWKQLDPGQRDLFRDVTLENYTHLVSIGLQVSKPDVISQLEQGTEPWIMEPSIPVGTCADWETRLENSVSAPEPDISEEELSPEVIVEKHKRDDSWSSNLLESWEYEGSLERQQANQQTLPKEIKVTEKTIPSWEKGPVNNEFGKSVNVSSNLVTQEPSPEETSTKRSIKQNSNPVKKEKSCKCNECGKAFSYCSALIRHQRTHTGEKPYKCNECEKAFSRSENLINHQRIHTGDKPYKCDQCGKGFIEGPSLTQHQRIHTGEKPYKCDECGKAFSQRTHLVQHQRIHTGEKPYTCNECGKAFSQRGHFMEHQKIHTGEKPFKCDECDKTFTRSTHLTQHQKIHTGEKTYKCNECGKAFNGPSTFIRHHMIHTGEKPYECNECGKAFSQHSNLTQHQKTHTGEKPYDCAECGKSFSYWSSLAQHLKIHTGEKPYKCNECGKAFSYCSSLTQHRRIHTREKPFECSECGKAFSYLSNLNQHQKTHTQEKAYECKECGKAFIRSSSLAKHERIHTGEKPYQCHECGKTFSYGSSLIQHRKIHTGERPYKCNECGRAFNQNIHLTQHKRIHTGAKPYECAECGKAFRHCSSLAQHQKTHTEEKPYQCNKCEKTFSQSSHLTQHQRIHTGEKPYKCNECDKAFSRSTHLTEHQNTHTGEKPYNCNECRKTFSQSTYLIQHQRIHSGEKPFGCNDCGKSFRYRSALNKHQRLHPGI

SEQ ID NO: 16010 - protein, 626 aa, Homo Sapiens
MASPSPPPESKGLLTFEDVAVFFTQEEWDYLDPAQRSLYKDVMMENYGNLVSLDVLNRDKDEEPTVKQEIEEIEEEVEPQGVIVTRIKSEIDQDPMGRETFELVGRLDKQRGIFLWEIPRESLTQEQRMFRENTNIIRKRPNSEEKCHKCEECGKGFVRKAHFIQHQRVHTGEKPFQCNECGKSFSRSSFVIEHQRIHTGERPYECNYCGKTFSVSSTLIRHQRIHTGERPYQCNQCKQSFSQRRSLVKHQRIHTGEKPHKCSDCGKAFSWKSHLIEHQRTHTGEKPYHCTKCKKSFSRNSLLVEHQRIHTGERPHKCGECGKAFRLSTYLIQHQKIHTGEKPFLCIECGKSFSRSSFLIEHQRIHTGERPYQCKECGKSFSQLCNLTRHQRIHTGDKPHKCEECGKAFSRSSGLIQHQRIHTREKTYPYNETKESFDPNCSLVIQQEVYPKEKSYKCDECGKTFSVSAHLVQHQRIHTGEKPYLCTVCGKSFSRSSFLIEHQRIHTGERPYLCRQCGKSFSQLCNLIRHQGVHTGNKPHKCDECGKAFSRNSGLIQHQRIHTGEKPYKCEKCDKSFSQQRSLVNHQKIHAEVKTQETHECDACGEAFNCRISLIQHQKLHTAWMQ

SEQ ID NO: 16011 - protein, 458 aa, Homo Sapiens
MAAMPLKAQYQEMVTFEDVAVHFTKTEWTGLSPAQRALYRSVMLENFGNLTALGYPVPKPALISLLERGDMAWGLEAQDDPPAERTKNVCKDVETNIDSESTLIQGISEERDGMMSHGQLKSVPQRTDFPETRNVEKHQDIPTVKNIQGKVPRIPCARKPFICEECGKSFSYFSYYARHQRIHTGEKPFECSECGKAFNGNSSLIRHQRIHTGERPYQCEECGRAFNDNANLIRHQRIHSGDRPYYCTECGNSFTSSSEFVIHQRIHTGEKPYECNECGKAFVGNSPLLRHQKIHTGEKPYECNECGKSFGRTSHLSQHQRIHTGEKPYSCKVCGQAFNFHTKLTRHQRIHSEEKPFDCVDCGKAFSAQEQLKRHLRIHTQESSYVCDECGKALTSKRNLHQHQRIHTGEKPYECSKYEKAFGTSSQLGHLEHVYSGEKPVLDICRFGLPEFFTPFYW

SEQ ID NO: 16012 - protein, 629 aa, Homo Sapiens
MTLLTFRDVAIEFSLEEWKCLDLAQQNLYRDVMLENYRNLFSVGLTVCKPGLITCLEQRKEPWNVKRQEAADGHPEMGFHHATQACLELLGSSDLPASASQSAGITGVNHRAQPGLNVSVDKFTALCSPGVLQTVKWFLEFRCIFSLAMSSHFTQDLLPEQGIQDAFPKRILRGYGNCGLDNLYLRKDWESLDECKLQKDYNGLNQCSSTTHSKIFQYNKYVKIFDNFSNLHRRNISNTGEKPFKCQECGKSFQMLSFLTEHQKIHTGKKFQKCGECGKTFIQCSHFTEPENIDTGEKPYKCQECNNVIKTCSVLTKNRIYAGGEHYRCEEFGKVFNQCSHLTEHEHGTEEKPCKYEECSSVFISCSSLSNQQMILAGEKLSKCETWYKGFNHSPNPSKHQRNEIGGKPFKCEECDSIFKWFSDLTKHKRIHTGEKPYKCDECGKAYTQSSHLSEHRRIHTGEKPYQCEECGKVFRTCSSLSNHKRTHSEEKPYTCEECGNIFKQLSDLTKHKKTHTGEKPYKCDECGKNFTQSSNLIVHKRIHTGEKPYKCEECGRVFMWFSDITKHKKTHTGEKPYKCDECGKNFTQSSNLIVHKRIHTGEKPYKCEKCGKAFTQFSHLTVHESIHT

SEQ ID NO: 16013 - protein, 1029 aa, Homo Sapiens
MTRENVAHNALRQEGLVKGKDDTWKWGTSFQGSSSSVWETSHLHFRQLRYHETSGPQEALSRLRELCRRWLRPEARTKAQILELLVLEQFLSILPGEIRTWVQLHHPGSGEEAVALVEELQKDLDGPAIQVPVLVKDQDTLQKVVSAPGTTLPPVLPGSHIAAEICPHPPTDLVAFNLQDPQHDSPAPEASALSQEENPRNQLMALMLLTAQPQELVMFEEVSVCFTSEEWACLGPIQRALYWDVMLENYGNVTSLEWETMTENEEVTSKPSSSQRADSHKGTSKRLQGSVPQVLDFEEECEWQVLASQWGNETDERADTVKKVSLCERDKKKRTPPEKQGQKWKELGDSLTFGSAISESLIGTEGKKFYKCDMCCKHFNKISHLINHRRIHTGEKPHKCKECGKGFIQRSSLLMHLRNHSGEKPYKCNECGKAFSQSAYLLNHQRIHTGEKPYKCKECGKGFYRHSGLIIHLRRHSGERPYKCNECGKVFSQNAYLIDHQRLHKGEEPYKCNKCQKAFILKKSLILHQRIHSGEKPYKCDECGKTFAQTTYLIDHQRLHSAENPYKCKECGKVFIRSKSLLLHQRVHTEKKTFGCKKCGKIFSSKSNFIDHKRMHSREKPYKCTECGKAFTQSAYLFDHQRLHNGEKPYECNECGKVFILKKSLILHQRFHTGENLYECKDCGKVFGSNRNLIDHERLHNGEKPYECRECGKTFIMSKSFMVHQKLHTQEKAYKCEDCGKAFSYNSSLLVHRRIHTGEKPFECSECGRAFSSNRNLIEHKRIHSGEKPYECDECGKCFILKKSLIGHQRIHTREKSYKCNDCGKVFSYRSNLIAHQRIHTGEKPYACSECGKGFTYNRNLIEHQRIHSGEKTYECHVCRKVLTSSRNLMVHQRIHTGEKPYKCNECGKDFSQNKNLVVHQRMHTGEKPYECDKCRKSFTSKRNLVGHQRIHTGEKPYGCNDCSKVFRQRKNLTVHQKIHTDEKPCECDVSEKEFSQTSNLHLQQKIHTIEEFSWLQNTNESKIEIQKI

SEQ ID NO: 16014 - protein, 426 aa, Homo Sapiens
MAAVSPTTRCQESVTFEDVAVVFTDEEWSRLVPIQRDLYKEVMLENYNSIVSLGLPVPQPDVIFQLKRGDKPWMVDLHGSEEREWPESVSLDWETKPEIHDASDKKSEGSLRECLGRQSPLCPKFEVHTPNGRMGTEKQSPSGETRKKSLSRDKGLRRRRSALSREILTKERHQECSDCGKTFFDHSSLTRHQRTHTGEKPYDCRECGKAFSHRSSLSRHLMSHTGESPYECSVCSKAFFDRSSLTVHQRIHTGEKPFQCNECGKAFFDRSSLTRHQRIHTGESPYECHQCGKAFSQKSILTRHQLIHTGRKPYECNECGKAFYGVSSLNRHQKAHAGDPRYQCNECGKAFFDRSSLTQHQKIHTGDKPYECSECGKAFSQRCRLTRHQRVHTGEKPFECTVCGKVFSSKSSVIQHQRRYAKQGID

SEQ ID NO: 16015 - protein, 532 aa, Homo Sapiens
MMFQDSVAFEDVAVSFTQEEWALLDPSQKNLYRDVMQETFKNLTSVGKTWKVQNIEDEYKNPRRNLSLMREKLCESKESHHCGESFNQIADDMLNRKTLPGITPCESSVCGEVGTGHSSLNTHIRADTGHKSSEYQEYGENPYRNKECKKAFSYLDSFQSHDKACTKEKPYDGKECTETFISHSCIQRHRVMHSGDGPYKCKFCGKAFYFLNLCLIHERIHTGVKPYKCKQCGKAFTRSTTLPVHERTHTGVNADECKECGNAFSFPSEIRRHKRSHTGEKPYECKQCGKVFISFSSIQYHKMTHTGEKPYECKQCGKAFRCGSHLQKHGRTHTGEKPYECRQCGKAFRCTSDLQRHEKTHTEDKPYGCKQCGKGFRCASQLQIHERTHSGEKPHECKECGKVFKYFSSLRIHERTHTGEKPHECKQCGKAFRYFSSLHIHERTHTGDKPYECKVCGKAFTCSSSIRYHERTHTGEKPYECKHCGKAFISNYIRYHERTHTGEKPYQCKQCGKAFIRASSCREHERTHTINR

SEQ ID NO: 16016 - protein, 390 aa, Homo Sapiens; identical to SEQ ID NO: 15978

SEQ ID NO: 16017 - protein, 395 aa, Homo Sapiens
MMAAKVVPMPPKPKQSFILRVPPDSKLGQDLLRDATNGPKTIHQLVLEHFLTFLPKPSLVQPSQKVKETLVIMKDVSSSLQNRVHPRPLVKLLPKGVQKEQETVSLYLKANPEELVVFEDLNVFHCQEECVSLDPTQQLTSEKEDDSSVGEMMLLAVNGSNPEGEDPEREPVENEDYREKSSDDDEMDSSLVSQQPPDNQEKERLNTSIPQKRKMRNLLVTIENDTPLEELSKYVDISIIALTRNRRTRRWYTCPLCGKQFNESSYLISHQRTHTGEKPYDCNHCGKSFNHKTNLNKHERIHTGEKPYSCSQCGKNFRQNSHRSRHEGIHIREKIFKCPECGKTFPKNEEFVLHLQSHEAERPYGCKKCGRRFGRLSNCTRHEKTHSACKTRKQK

SEQ ID NO: 16018 - protein, 648 aa, Homo Sapiens
MATAVEPEDQDLWEEEGILMVKLEDDFTCRPESVLQRDDPVLETSHQNFRRFRYQEAASPREALIRLRELCHQWLRPERRTKEQILELLVLEQFLTVLPGELQSWVRGQRPESGEEAVTLVEGLQKQPRRPRRWVTVHVHGQEVLSEETVHLGVEPESPNELQDPVQSSTPEQSPEETTQSPDLGAPAEQRPHQEEELQTLQESEVPVPEDPDLPAERSSGDSEMVALLTALSQGLVTFKDVAVCFSQDQWSDLDPTQKEFYGEYVLEEDCGIVVSLSFPIPRPDEISQVREEEPWVPDIQEPQETQEPEILSFTYTGDRSKDEEECLEQEDLSLEDIHRPVLGEPEIHQTPDWEIVFEDNPGRLNERRFGTNISQVNSFVNLRETTPVHPLLGRHHDCSVCGKSFTCNSHLVRHLRTHTGEKPYKCMECGKSYTRSSHLARHQKVHKMNAPYKYPLNRKNLEETSPVTQAERTPSVEKPYRCDDCGKHFRWTSDLVRHQRTHTGEKPFFCTICGKSFSQKSVLTTHQRIHLGGKPYLCGECGEDFSEHRRYLAHRKTHAAEELYLCSECGRCFTHSAAFAKHLRGHASVRPCRCNECGKSFSRRDHLVRHQRTHTGEKPFTCPTCGKSFSRGYHLIRHQRTHSEKTS

SEQ ID NO: 16019 - protein, 554 aa, Homo Sapiens
MSADGGGIQDTQDKETPPEVPDRGHPHQEMPSKLGEAVPSGDTQESLHIKMEPEEPHSEGASQEDGAQGAWGWAPLSHGSKEKALFLPGGALPSPRIPVLSREGRTRDRQMAAALLTAWSQMPVTFEDVALYLSREEWGRLDHTQQNFYRDVLQKKNGLSLGFPFSRPFWAPQAHGKGEASGSSRQAGDEKEWRGACTGAVEVGQRVQTSSVAALGNVKPFRTRAGRVQWGVPQCAQEAACGRSSGPAKDSGQPAEPDRTPDAAPPDPSPTEPQEYRVPEKPNEEEKGAPESGEEGLAPDSEVGRKSYRCEQCGKGFSWHSHLVTHRRTHTGEKPYACTDCGKRFGRSSHLIQHQIIHTGEKPYTCPACRKSFSHHSTLIQHQRIHTGEKPYVCDRCAKRFTRRSDLVTHQGTHTGAKPHKCPICAKCFTQSSALVTHQRTHTGVKPYPCPECGKCFSQRSNLIAHNRTHTGEKPYHCLDCGKSFSHSSHLTAHQRTHRGVRPYACPLCGKSFSRRSNLHRHEKIHTTGPKALAMLMLGAAAAGALATPPPAPT

SEQ ID NO: 16020 - protein, 478 aa, Homo Sapiens; identical to SEQ ID NO: 14396

SEQ ID NO: 16021 - protein, 1280 aa, Homo Sapiens
MGSLTFRDVAIEFSLEEWQCLDTAQQNLYRNVMLENYRNLVFLGIAAFKPDLIIFLEEGKESWNMKRHEMVEESPVICSHFAQDLWPEQGIEDSFQKVILRRYEKCGHENLHLKIGYTNVDECKVHKEGYNKLNQSLTTTQSKVFQRGKYANVFHKCSNSNRHKIRHTGKKHLQCKEYVRSFCMLSHLSQHKRIYTRENSYKCEEGGKAFNWSSTLTYYKSAHTGEKPYRCKECGKAFSKFSILTKHKVIHTGEKSYKCEECGKAFNQSAILTKHKIIHTGEKPNKCEECGKAFSKVSTLTTHKAIHAGEKPYKCKECGKAFSKVSTLITHKAIHAGEKPYKCKECGKAFSKFSILTKHKVIHTGEKPYKCEECGKAYKWPSTLSYHKKIHTGEKPYKCEECGKGFSMFSILTKHEVIHTGEKPYKCEECGKAFNWSSNLMEHKKIHTGETPYKCEECGKGFSMFSILTKHKVIHNGEKPYKCEECDKATHAGEKPYKCEECGKAFNWSSNLMEHKRIHTGEKPYKCEECGKSFSTFSILTKHKVIHTGEKPYKCEECGKAYKWSSTLSYHKKIHTVEKPYKCEECGKAFNQSAILIKHKRIHTGEKPYKCEECGKTFSKVSTLTTHKAIHAGEKPYKCKECGKTFIKVSTLTTHKAIHAGEKPYKCKECGKAFSKFSILTKHKVIHTGEKPYKCEECGKAFNWSSNLMEHKRIHTGEKPYKCEECGKSFSTFSVLTKHKVIHTGEKPYKCEECGKAYKWSSTLSYHKKIHTVEKPYKCEECGKAFNRSAILIKHKRIHTDEKPYKCEECGKTFSKVSTLTTHKAIHAGEKPYKCKECGKAFSKFSILTKHKVIHTGEKPYKCEECGKAYKWPSTLSYHKKIHTGEKPYKCEECGKGFSMFSILTKHEVIHTGEKPYKCEECGKAFSWLSVFSKHKKTHAGEKFYKCEACGKAYKSSSTLSYHKKIHTEEKPYKYEECGKGFSTFSILTKHKVIHTGEKPYKCEECGKAFNWSSNLMEHKKIHTGETPYKCEECDKAFSWPSSLTEHKATHAGEKPYKCEECGKAFSWPSRLTEHKATHAGEEPYKCEECGKAFNWSSNLMEHKRIHTGEKPYKCEECGKSFSTFSILTKHKVIHTGEKPYKCEECGKAYKWSSTLSYHKKIHTVEKPYKCEECGKGFVMFSILAKHKVIHTGEKLYKCEECGKAYKWPSTLRYHKKIHTGEKPYKCEECGKAFSTFSILTKHKVIHTGEKPYKCEECGKAFSWLSVFSKHKKIHTGEKL

SEQ ID NO: 16022 - protein, 564 aa, Homo Sapiens
MLGFPPGRPQLPVQLRPQTRMATALRDPASGSVTFEDVAVYFSWEEWDLLDEAQKHLYFDVMLENFALTSSLGCWCGVEHEETPSEQRISGERVPQFRTSKEGSSSQNADSCEICCLVLRDILHLAEHQGTNCGQKLHTCGKQFYISANLQQHQRQHITEAPFRSYVDTASFTQSCIVHVSEKPFTCREIRKDFLANMRFLHQDATQTGEKPNNSNKCAVAFYSGKSHHNWGKCSKAFSHIDTLVQDQRILTREGLFECSKCGKACTRRCNLIQHQKVHSEERPYECNECGKFFTYYSSFIIHQRVHTGERPYACPECGKSFSQIYSLNSHRKVHTGERPYECGECGKSFSQRSNLMQHRRVHTGERPYECSECGKSFSQNFSLIYHQRVHTGERPHECNECGKSFSRSSSLIHHRRLHTGERPYECSKCGKSFKQSSSFSSHRKVHTGERPYVCGECGKSFSHSSNLKNHQRVHTGERPVECSECSKSFSCKSNLIKHLRVHTGERPYECSECGKSFSQSSSLIQHRRVHTGKRPYQCSQCGKSFGCKSVLIQHQRVHIGEKP

SEQ ID NO: 16023 - protein, 495 aa, Homo Sapiens
MAESAPARHRRKRRSTPLTSSTLPSQATEKSSYFQTTEISLWTVVAAIQAVEKKMESQAARLQSLEGRTGTAEKKLADCEKMAVEFGNQLEGKWAVLGTLLQEYGLLQRRLENVENLLRNRNFWILRLPPGSKGEAPKVSRSLENDGVCFTEQEWENLEDWQKELYRNVMESNYETLVSLKVLGQTEGEAELGTEMLGDLEEEGPGGAHPAGGVMIKQELQYTQEGPADLPGEFSCIAEEQAFLSPEQTELWGGQGSSVLLETGPGDSTLEEPVGSRVPSSSRTVGCPKQKSHRQVQLDQECGQGLKLKKDTSRPYECSECEITFRYKQQLATHLRSHSGWGSCTPEEPEESLRPRPRLKPQTKKAKLHQCDVCLRSFSCKVSLVTHQRCHLQEGPSAGQHVQERFSPNSLVALPGHIPWRKSRSSLICGYCGKSFSHPSDLVRHQRIHTGERPYSCTECEKSFVQKQHLLQHQKIHQRERGGLALEPGRPNGLL

SEQ ID NO: 16024 - protein, 459 aa, Homo Sapiens
MAAPLEAQDQAPGEGEGLLIVKVEDSSWEQESAQHEDGRDSEACRQRFRQFCYGDVHGPHEAFSQLWELCCRWLRPELRTKEQILELLVLEQFLTVLPGEIQGWVREQHPGSGEEAVALVEDLQKQPVKAWRQDVPSEEAEPEAAGRGSQATGPPPTVGARRRPSVPQEQHSHSAQPPALLKEGRPGETTDTCFVSGVHGPVALGDIPFYFSREEWGTLDPAQRDLFWDIKRENSRNTTLGFGLKGQSEKSLLQEMVPVVPGQTGSDVTVSWSPEEAEAWESENRPRAALGPVVGARRGRPPTRRRQFRDLAAEKPHSCGQCGKRFRWGSDLARHQRTHTGEKPHKCPECDKSFRSSSDLVRHQGVHTGEKPFSCSECGKSFSRSAYLADHQRIHTGEKPFGCSDCGKSFSLRSYLLDHRRVHTGERPFGCGECDKSFKQRAHLIAHQSLHAKMAQPVG

SEQ ID NO: 16025 - protein, 606 aa, Homo Sapiens
MAVTFEDVTIIFTWEEWKFLDSSQKRLYREVMWENYTNVMSVENWNESYKSQEEKFRYLEYENFSYWQGWWNAGAQMYENQNYGETVQGTDSKDLTQQDRSQCQEWLILSTQVPGYGNYELTFESKSLRNLKYKNFMPWQSLETKTTQDYGREIYMSGSHGFQGGRYRLGISRKNLSMEKEQKLIVQHSYIPVEEALPQYVGVICQEDLLRDSMEEKYCGCNKCKGIYYWNSRCVFHKRNQPGENLCQCSICKACFSQRSDLYRHPRNHIGKKLYGCDEVDGNFHQSSGVHFHQRVHIGEVPYSCNACGKSFSQISSLHNHQRVHTEEKFYKIECDKDLSRNSLLHIHQRLHIGEKPFKCNQCGKSFNRSSVLHVHQRVHTGEKPYKCDECGKGFSQSSNLRIHQLVHTGEKSYKCEDCGKGFTQRSNLQIHQRVHTGEKPYKCDDCGKDFSHSSDLRIHQRVHTGEKPYTCPECGKGFSKSSKLHTHQRVHTGEKPYKCEECGKGFSQRSHLLIHQRVHTGEKPYKCHDCGKGFSHSSNLHIHQRVHTGEKPYQCAKCGKGFSHSSALRIHQRVHAGEKPYKCREYYKGFDHNSHLHNNHRRGNL

SEQ ID NO: 16026 - protein, 517 aa, Homo Sapiens
MQPLSKLMAISKPRNLSLREQREVLRADMSWQQETNPVVETHDSEASRQKFRHFQYLKVSGPHEALSQLWELCLQWLRPEIHTKKQIIELLVLEQFLAILPEEVRTWVNLQHPNNSKDMVTLIEDVIEMLEDEDMPCKDSALQMGSIKEKMKAGSRTGKPQEPVTFKDVVVEFSKEEWGQLDSAVKNLYRNVMLENFRNLNSLRKAHLLSKPFESLKLESKKKRWIMEKEIPRKTIFDMKSISGEESSHGVIMTRLTESGHPSSDAWKGENWLYRNQKKWDINLPQEAFIPETIYTEEEDFECSENKKSFDINSVSSICAIQVGIPSRKGSPKCDKFKTYFKFNLDSVGKQHSEYEYGNDLSLSTDIRHQKSHTTMNSYECYQCGKAFCRSSSLIRHQIIHTGEKPYKCSECGRFFNRRTNLTKHQKLHAEAKACTSNKCGKAFSKSEDSNNPTLHFGNNFYQCVNCGKSFNRSSSLIRHQMIHTGEKPFKCKECSKAFNRSSNLVKHQKLHTRDKS

SEQ ID NO: 16027 - protein, 1048 aa, Homo Sapiens
MQSKVTGNMPTQSLLMYMDGPEVIGSSLGSPMEMEDALSMKGTAVVPFRATQEKNVIQIEGYMPLDCMFCSQTFTHSEDLNKHVLMQHRPTLCEPAVLRVEAEYLSPLDKSQVRTEPPKEKNCKENEFSCEVCGQTFRVAFDVEIHMRTHKDSFTYGCNMCGRRFKEPWFLKNHMRTHNGKSGARSKLQQGLESSPATINEVVQVHAAESISSPYKICMVCGFLFPNKESLIEHRKVHTKKTAFGTSSAQTDSPQGGMPSSREDFLQLFNLRPKSHPETGKKPVRCIPQLDPFTTFQAWQLATKGKVAICQEVKESGQEGSTDNDDSSSEKELGETNKGSCAGLSQEKEKCKHSHGEAPSVDADPKLPSSKEKPTHCSECGKAFRTYHQLVLHSRVHKKDRRAGAESPTMSVDGRQPGTCSPDLAAPLDENGAVDRGEGGSEDGSEDGLPEGIHLDKNDDGGKIKHLTSSRECSYCGKFFRSNYYLNIHLRTHTGEKPYKCEFCEYAAAQKTSLRYHLERHHKEKQTDVAAEVKNDGKNQDTEDALLTADSAQTKNLKRFFDGAKDVTGSPPAKQLKEMPSVFQNVLGSAVLSPAHKDTQDFHKNAADDSADKVNKNPTPAYLDLLKKRSAVETQANNLICRTKADVTPPPDGSTTHNLEVSPKEKQTETAADCRYRPSVDCHEKPLNLSVGALHNCPAISLSKSLIPSITCPFCTFKTFYPEVLMMHQRLEHKYNPDVHKNCRNKSLLRSRRTGCPPALLGKDVPPLSSFCKPKPKSAFPAQSKSLPSAKGKQSPPGPGKAPLTSGIDSSTLAPSNLKSHRPQQNVGVQGAATRQQQSEMFPKTSVSPAPDKTKRPETKLKPLPVAPSQPTLGSSNINGSIDYPAKNDSPWAPPGRDYFCNRSASNTAAEFGEPLPKRLKSSVVALDVDQPGANYRRGYDLPKYHMVRGITSLLPQDCVYPSQALPPKPRFLSSSEVDSPNVLTVQKPYGGSGPLYTCVPAGSPASSSTLEGKRPVSYQHLSNSMAQKRNYENFIGNAHYRPNDKKT

SEQ ID NO: 16028 - protein, 722 aa, Homo Sapiens
MEGSRPRAPSGHLAPSPPAFDGELDLQRYSNGPAVSAGSLGMGAVSWSESRAGERRFPCPVCGKRFRFNSILALHLRAHPGAQAFQCPHCGHRAAQRALLRSHLRTHQPERPRSPAARLLLELEERALLREARLGRARSSGGMQATPATEGLARPQAPSSSAFRCPYCKGKFRTSAERERHLHILHRPWKCGLCSFGSSQEEELLHHSLTAHGAPERPLAATSAAPPPQPQPQPPPQPEPRSVPQPEPEPEPEREATPTPAPAAPEEPPAPPEFRCQVCGQSFTQSWFLKGHMRKHKASFDHACPVCGRCFKEPWFLKNHMKVHASKLGPLRAPGPASGPARAPQPPDLGLLAYEPLGPALLLAPAPTPAERREPPSLLGYLSLRAGEGRPNGEGAEPGPGRSFGGFRPLSSALPARARRHRAEEPEEEEEVVEAEEETWARGRSLGSLASLHPRPGEGPGHSASAAGAQARSTATQEENGLLVGGTRPEGGRGATGKDCPFCGKSFRSAHHLKVHLRVHTGERPYKCPHCDYAGTQSGSLKYHLQRHHREQRSGAGPGPPPEPPPPSQRGSAPQSGAKPSPQPATWVEGASSPRPPSSGAGPGSRRKPASPGRTLRNGRGGEAEPLDLSLRAGPGGEAGPGGALHRCLFCPFATGAPELMALHLQVHHSRRARGRRPPQADASPPYARVPSGETPPSPSQEGEEGSGLSRPGEAGLGGQER

SEQ ID NO: 16029 - protein, 224 aa, Homo Sapiens
MRLAKPKAGISRSSSQGKAYENKRKTGRQRQKWGMTIRFDSSFSRLRRSLDDKPYKCTECEKSFSQSSTLFQHQKIHTGKKSHKCADCGKSFFQSSNLIQHRRIHTGEKPYKCDECGESFKQSSNLIQHQRIHTGEKPYQCDECGRCFSQSSHLIQHQRTHTGEKPYQCSECGKCFSQSSHLRQHMKVHKEEKPRKTRGKNIRVKTHLPSWKAGTGRKSVAGLR

SEQ ID NO: 16030 - protein, 617 aa, Homo Sapiens
MISPSLELLHSGLCKFPEVEGKMTTFKEAVTFKDVAVVFTEEELGLLDPAQRKLYRDVMLENFRNLLSVGNQPFHQDTFHFLGKEKFWKMKTTSQREGNSGGKIQIEMETVPEAGPHEEWSCQQIWEQIASDLTRSQNSIRNSSQFFKEGDVPCQIEARLSISHVQQKPYRCNECKQSFSDVSVFDLHQQSHSGEKSHTCGECGKSFCYSPALHIHQRVHMGEKCYKCDVCGKEFNQSSHLQTHQRVHTGEKPFKCGQCGKGFHSRSALNVHCKLHTGEKPYNCEECGKAFIHDSQLQEHQRIHTGEKPFKCDICGKSFRVRSRLNRHSMVHTGEKPFRCDTCGKNFRQRSALNSHSMVHIEEKPYKCEQCGKGFICRRDFCKHQMVHTGEKPYNCKECGKTFRWSSCLLNHQQVHSGQKSFKCEECGKGFYTNSRRSSHQRSHNGEKPYNCEECGKDYKRRLDLEFHQRVHTGERPYNCKECGKSFGWASCLLKHQRLHSGEKPFKCEECGKRFTQSSQLHSHQTCHTGEKLYKCEQCEKGYNSKFNLDMHQRVHGGERPYNCKECGKSFGWASCLLKHQRLHSGEKPLKSGVWEEIYSEFTASFTSVSLCGRKAI

SEQ ID NO: 16031 - protein, 482 aa, Homo Sapiens
MTMSKEAVTFKDVAVVFTEEELGLLDLAQRKLYRDVMLENFRNLLSVGHQPFHRDTFHFLREEKFWMMDIATQREGNSGGKIQPEMKTFPEAGPHEGWSCQQIWEEIASDLTRPQDSTIKSSQFFEQGDAHSQVEEGLSIMHTGQKPSNCGKCKQSFSDMSIFDLPQQIRSAEKSHSCDECGKSFCYISALHIHQRVHLGEKLFKCDVCGKEFSQSLHLQTHQRVHTGEKPFKCEQCGRGFRCRSALTVHCKLHMGEKHYNCEACGRAFIHDFQLQKHQRIHTGEKPFKCEICSVSFRLRSSLNRHCVVHTGKKPNSTGEYGKGFIRRLDLCKHQTIHTGEKPYNCKECGKSFRRSSYLLIHQRVHTGEKPYKCDKCGKSYITKSGLDLHHRAHTGERPYNCDDCGKSFRQASSILNHKRLHCRKKPFKCEDCGKKLVYRSYRKDQQKNHSGENPSKCEDCGKRYKRRLNLDIILSLFLNDT

SEQ ID NO: 16032 - protein, 707 aa, Homo Sapiens
MTTFKEAMTFKDVAVVFTEEELGLLDLAQRKLYRDVMLENFRNLLSVGHQAFHRDTFHFLREEKIWMMKTAIQREGNSGDKIQTEMETVSEAGTHQEWSFQQIWEKIASDLTRSQDLMINSSQFSKEGDFPCQTEAGLSVIHTRQKSSQGNGYKPSFSDVSHFDFHQQLHSGEKSHTCDECGKNFCYISALRIHQRVHMGEKCYKCDVCGKEFSQSSHLQTHQRVHTGEKPFKCVECGKGFSRRSALNVHHKLHTGEKPYNCEECGKAFIHDSQLQEHQRIHTGEKPFKCDICGKSFCGRSRLNRHSMVHTAEKPFRCDTCDKSFRQRSALNSHRMIHTGEKPYKCEECGKGFICRRDLYTHHMVHTGEKPYNCKECGKSFRWASCLLKHQRVHSGEKPFKCEECGKGFYTNSQCYSHQRSHSGEKPYKCVECGKGYKRRLDLDFHQRVHTGEKLYNCKECGKSFSRAPCLLKHERLHSGEKPFQCEECGKRFTQNSHLHSHQRVHTGEKPYKCEKCGKGYNSKFNLDMHQKVHTGERPYNCKECGKSFGWASCLLKHQRLHSGEKPFKCEECGKRFTQNSQLHSHQRVHTGEKPYKCDECGKGFSWSSTRLTHQRRHSRETPLKCEQHGKNIVQNSFSKVQEKVHSVEKPYKCEDCGKGYNRRLNLDMHQRVHMGEKTWKCRECDMCFSQASSLRLHQNVHVGEKP

SEQ ID NO: 16033 - protein, 543 aa, Homo Sapiens
MAAAKAEMQLMSPLQISDPFGSFPHSPTMDNYPKLEEMMLLSNGAPQFLGAAGAPEGSGSNSSSSSSGGGGGGGGGSNSSSSSSTFNPQADTGEQPYEHLTAESFPDISLNNEKVLVETSYPSQTTRLPPITYTGRFSLEPAPNSGNTLWPEPLFSLVSGLVSMTNPPASSSSAPSPAASSASASQSPPLSCAVPSNDSSPIYSAAPTFPTPNTDIFPEPQSQAFPGSAGTALQYPPPAYPAAKGGFQVPMIPDYLFPQQQGDLGLGTPDQKPFQGLESRTQQPSLTPLSTIKAFATQSGSQDLKALNTSYQSQLIKPSRMRKYPNRPSKTPPHERPYACPVESCDRRFSRSDELTRHIRIHTGQKPFQCRICMRNFSRSDHLTTHIRTHTGEKPFACDICGRKFARSDERKRHTKIHLRQKDKKADKSVVASSATSSLSSYPSPVATSYPSPVTTSYPSPATTSYPSPVPTSFSSPGSSTYPSPVHSGFPSPSVATTYSSVPPAFPAQVSSFPSSAVTNSFSASTGLSDMTATFSPRTIEIC

SEQ ID NO: 16034 - protein, 706 aa, Homo Sapiens; identical to SEQ ID NO: 14917

SEQ ID NO: 16035 - protein, 803 aa, Homo Sapiens
MNMFKEAVTFKDVAVAFTEEELGLLGPAQRKLYRDVMVENFRNLLSVGHPPFKQDVSPIERNEQLWIMTTATRRQGNLGEKNQSKLITVQDRESEEELSCWQIWQQIANDLTRCQDSMINNSQCHKQGDFPYQVGTELSIQISEDENYIVNKADGPNNTGNPEFPILRTQDSWRKTFLTESQRLNRDQQISIKNKLCQCKKGVDPIGWISHHDGHRVHKSEKSYRPNDYEKDNMKILTFDHNSMIHTGQKSYQCNECKKPFSDLSSFDLHQQLQSGEKSLTCVERGKGFCYSPVLPVHQKVHVGEKLKCDECGKEFSQGAHLQTHQKVHVIEKPYKCKQCGKGFSRRSALNVHCKVHTAEKPYNCEECGRAFSQASHLQDHQRLHTGEKPFKCDACGKSFSRNSHLQSHQRVHTGEKPYKCEECGKGFICSSNLYIHQRVHTGEKPYKCEECGKGFSRPSSLQAHQGVHTGEKSYICTVCGKGFTLSSNLQAHQRVHTGEKPYKCNECGKSFRRNSHYQVHLVVHTGEKPYKCEICGKGFSQSSYLQIHQKAHSIEKPFKCEECGQGFNQSSRLQIHQLIHTGEKPYKCEECGKGFSRRADLKIHCRIHTGEKPYNCEECGKVFRQASNLLAHQRVHSGEKPFKCEECGKSFGRSAHLQAHQKVHTGDKPYKCDECGKGFKWSLNLDMHQRVHTGEKPYKCGECGKYFSQASSLQLHQSVHTGEKPYKCDVCGKVFSRSSQLQSHQRVHTGEKPYKCEICGKSFSWRSNLTVHHRIHVGDKSYKSNRGGKNIRESTQEKKSIK

SEQ ID NO: 16036 - protein, 799 aa, Homo Sapiens
MPSQNYDLPQKKQEKMTKFQEAVTFKDVAVVFSREELRLLDLTQRKLYRDVMVENFKNLVAVGHLPFQPDMVSQLEAEEKLWMMETETQRSSKHQNKMETLQKFALKYLSNQELSCWQIWKQVASELTRCLQGKSSQLLQGDSIQVSENENNIMNPKGDSSIYIENQEFPFWRTQHSCGNTYLSESQIQSRGKQIDVKNNLQIHEDFMKKSPFHEHIKTDTEPKPCKGNEYGKIISDGSNQKLPLGEKPHPCGECGRGFSYSPRLPLHPNVHTGEKCFSQSSHLRTHQRIHPGEKLNRCHESGDCFNKSSFHSYQSNHTGEKSYRCDSCGKGFSSSTGLIIHYRTHTGEKPYKCEECGKCFSQSSNFQCHQRVHTEEKPYKCEECGKGFGWSVNLRVHQRVHRGEKPYKCEECGKGFTQAAHFHIHQRVHTGEKPYKCDVCGKGFSHNSPLICHRRVHTGEKPYKCEACGKGFTRNTDLHIHFRVHTGEKPYKCKECGKGFSQASNLQVHQNVHTGEKRFKCETCGKGFSQSSKLQTHQRVHTGEKPYRCDVCGKDFSYSSNLKLHQVIHTGEKPYKCEECGKGFSWRSNLHAHQRVHSGEKPYKCEQCDKSFSQAIDFRVHQRVHTGEKPYKCGVCGKGFSQSSGLQSHQRVHTGEKPYKCDVCGKGFRYSSQFIYHQRGHTGEKPYKCEECGKGFGRSLNLRHHQRVHTGEKPHICEECGKAFSLPSNLRVHLGVHTREKLFKCEECGKGFSQSARLEAHQRVHTGEKPYKCDICDKDFRHRSRLTYHQKVHTGKKL

SEQ ID NO: 16037 - protein, 825 aa, Homo Sapiens
METLTSRHEKRALHSQASAISQDREEKIMSQEPLSFKDVAVVFTEEELELLDSTQRQLYQDVMQENFRNLLSVGERNPLGDKNGKDTEYIQDEELRFFSHKELSSCKIWEEVAGELPGSQDCRVNLQGKDFQFSEDAAPHQGWEGASTPCFPIENSLDSLQGDGLIGLENQQFPAWRAIRPIPIQGSWAKAFVNQLGDVQERCKNLDTEDTVYKCNWDDDSFCWISCHVDHRFPEIDKPCGCNKCRKDCIKNSVLHRINPGENGLKSNEYRNGFRDDADLPPHPRVPLKEKLCQYDEFSEGLRHSAHLNRHQRVPTGEKSVKSLERGRGVRQNTHIRNHPRAPVGDMPYRCDVCGKGFRYKSVLLIHQGVHTGRRPYKCEECGKAFGRSSNLLVHQRVHTGEKPYKCSECGKGFSYSSVLQVHQRLHTGEKPYTCSECGKGFCAKSALHKHQHIHPGEKPYSCGECGKGFSCSSHLSSHQKTHTGERPYQCDKCGKGFSHNSYLQAHQRVHMGQHLYKCNVCGKSFSYSSGLLMHQRLHTGEKPYKCECGKSFGRSSDLHIHQRVHTGEKPYKCSECGKGFRRNSDLHSHQRVHTGERPYVCDVCGKGFIYSSDLLIHQRVHTGEKPYKCAECGKGFSYSSGLLIHQRVHTGEKPYRCQECGKGFRCTSSLHKHQRVHTGKKPYTCDQCGKGFSYGSNLRTHQRLHTGEKPYTCCECGKGFRYGSGLLSHKRVHTGEKPYRCHVCGKGYSQSSHLQGHQRVHTGEKPYKCEECGKGFGRNSCLHVHQRVHTGEKPYTCGVCGKGFSYTSGLRNHQRVHLGENPYK

SEQ ID NO: 16038 - protein, 643 aa, Homo Sapiens
MLENYGNVASLGFPLLKPAVISQLEGGSELGGSSPLAAGTGLQGLQTDIQTDNDLTKEMYEGKENVSFELQRDFSQETDFSEASLLEKQQEVHSAGNIKKEKSNTIDGTVKDETSPVEECFFSQSSNSYQCHTITGEQPSGCTGLGKSISFDTKLVKHEIINSEERPFKCEELVEPFRCDSQLIQHQENNTEEKPYQCSECGKAFSINEKLIWHQRLHSGEKPFKCVECGKSFSYSSHYITHQTIHSGEKPYQCKMCGKAFSVNGSLSRHQRIHTGEKPYQCKECGNGFSCSSAYITHQRVHTGEKPYECNDCGKAFNVNAKLIQHQRIHTGEKPYECNECGKGFRCSSQLRQHQSIHTGEKPYQCKECGKGFNNNTKLIQHQRIHTGEKPYECTECGKAFSVKGKLIQHQRIHTGEKPYECNECGKAFRCNSQFRQHLRIHTGEKPYECNECGKAFSVNGKLMRHQRIHTGEKPFECNECGRCFTSKRNLLDHHRIHTGEKPYQCKECGKAFSINAKLTRHQRIHTGEKPFKCMECEKAFSCSSNYIVHQRIHTGEKPFQCKECGKAFHVNAHLIRHQRSHTGEKPFRCVECGKGFSFSSDYIIHQTVHTWKKPYMCSVCGKAFRFSFQLSQHQSVHSEGKS

SEQ ID NO: 16039 - protein, 230 aa, Homo Sapiens
MGQQISDQTQLVINKLPEKVAKHVTLVRESGSLTYEEFLGRVAELNDVTAKVASGQEKHLLFEVQPGSDSSAFWKVVVRVVCTKINKSSGIVEASRIMNLYQFIQLYKDITSQAAGVLAQSSTSEEPDENSSSVTSCQASLWMGRVKQLTDEEECCICMDGRADLILPCAHSFCQKCIDKWSDRHRNCPICRLQMTGANESWVVSDAPTEDDMANYILNMADEAGQPHRP

SEQ ID NO: 16040 - protein, 474 aa, Homo Sapiens
MTTFKEAVTFKDVAVFFTEEELGLLDPAQRKLYQDVMLENFTNLLSVGHQPFHPFHFLREEKFWMMETATQREGNSGGKTIAEAGPHEDCPCQQIWEQTASDLTQSQDSIINNSHFFEQGDVPSQVEAGLSIIHTGQKPSQNGKCKQSFSDVAIFDPPQQFHSGEKSHTCNECGKSFCYISALRIHQRVHLREKLSKCDMRGKEFSQSSCLQTRERVHTGEKPFKCEQCGKGFRCRAILQVHCKLHTGEKPYICEKCGRAFIHDFQLQKHQIIHTGEKPFKCEICGKSFCLRSSLNRHCMVHTAEKLYKSEECGKGFTDSLDLHKHQIIHTGQKPYNCKECGKSFRWSSYLLIHQRIHSGEKPYRCEECGKGYISKSGLNLHQRVHTGERPYNCKECGKSFSRASSILNHKKLHCRKKPFKCEDCGKRLVHRSFCKDQQGDHNGENSSKCEDCGKRYKRRLNLDIILSLFLNDM

SEQ ID NO: 16041 - protein, 417 aa, Homo Sapiens
MAVSLTAAETLALQGTQGQEKMMMMGPKEEEQSCEYETRLPGNHSTSQEIFRQRFRHLRYQETPGPREALSQLRVLCCEWLRPEKHTKEQILEFLVLEQFLTILPEELQSWVRGHHPKSGEEAVTVLEDLEKGLEPEPQVPGPAHGPAQEEPWEKKESLGAAQEALSIQLQPKETQPFPKSEQVYLHFLSVVTEDGPEPKDKGSLPQPPITEVESQVFSEKLATDTSTFEATSEGTLELQQRNPKAERLRWSPAQEESFRQMVVIHKEIPTGKKDHECSECGKTFIYNSHLVVHQRVHSGEKPYKCSDCGKTFKQSSNLGQHQRIHTGEKPFECNECGKAFRWGAHLVQHQRIHSGEKPYECNECGKAFSQSSYLSQHRRIHSGEKPFICKECGKAYGWCSELIRHRRVHARKEPSH

SEQ ID NO: 16042 - protein, 670 aa, Homo Sapiens
MTKFQEMVTFKDVAVVFTREELGLLDLAQRKLYQDVMLENFRNLLSVGYQPFKLDVILQLGKEDKLRMMETEIQGDGCSGHKNQNEIDTLQEVRLRFLSYEDLICWQIWEQFTSKLTSNQDLIINLQGKRSKLLKQGDSPCQVWTGESSQVSEDENYVIKLQGESSNSIKNQELPLRTTWDFWRKMYLREPQNYQSRCQQIDVKNKLCKCDHCVRQRIAHQHDDHGVHKREKAFSHNNCGKDCVKESSQHSIIQSGEQTSDENGKGLSVGSNLELHQQLHLRDKPHVNVEYGKGIGYSSGLPRHQCFHIGEKCYRNGDSGEGFSQGSHLQPHQRVSTGENLYRCQVYARSSNQNSCLPSHELTHPGEKLCTCGRCGKGFHHSLDFDIHCVDSAGERACKCDVYDKGFSQTSQLQAHQRGHSRDKTYKWEVSDRIFNRNSGLHQRVHTGEKPYKCEVCDKGFSKASNLQAHQRIHTGEKPYKCDVCDKNFSRNSHLQAHQRVHTGEKPYKCDTCGKDFSQISHLQAHQRVHKGEKPYKCETCGKGFSQSSHLQDHQQVHTGENPYKCDVCGKGFSWSSHLQAHQRVHTGEKPYKCEECRKGFIWNSYLHVHQRIHTGEKPYKCGMCGKSFSQTSHLQAHQRVHTGEKPYKCFVCGKGFSKSSLSSDSSESP

SEQ ID NO: 16043 - protein, 707 aa, Homo Sapiens; identical to SEQ ID NO: 16032

SEQ ID NO: 16044 - protein, 700 aa, Homo Sapiens
MTTFKEGLTFKDVAVVFTEEELGLLDPVQRNLYQDVMLENFRNLLSVGHHPFKHDVFLLEKEKKLDIMKTATQRKGKSADKIQSEVETVPEAGRHEELYWGQIWKQIASDLIKYEDSMISISRFPRQGDLSCQVRAGLYTTHTGQKFYQCDEYKKSFTDVFNFDLHQQLHSGEKSHTCDECGKSFCYISALHIHQRVHMGEKCYKCDVCGKEFSQSSHLQTHQRVHTVEKPFKCVECGKGFSRRSTLTVHCKLHSGEKPYNCEECGRAFIHASHLQEHQRIHTGEKPFKCDTCGKNFRRRSALNNHCMVHTGEKPYKCEDCGKCFTCSSNLRIHQRVHTGEKPYKCEECGKCFIQPSQFQAHRRIHTGEKPYVCKVCGKGFIYSSSFQAHQGVHTGEKPYKCNECGKSFRMKIHYQVHLVVHTGEKPYKCEVCGKAFRQSSYLKIHLKAHSVQKPFKCEECGQGFNQSSRLQIHQLIHTGEKPYKCEECGKGFSRRADLKIHCRIHTGEKPYNCEECGKVFSQASHLLTHQRVHSGEKPFKCEECGKSFSRSAHLQAHQKVHTGEKPYKCGECGKGFKWSLNLDMHQRVHTGEKPYTCGECGKHFSQASSLQLHQSVHTGEKPYKCDVCGKVFSRSSQLQYHRRVHTGEKPYKCEICGKRFSWRSNLVSHHKIHAAGTFYENDENSKNIRELSEGGSSTR

SEQ ID NO: 16045 - protein, 738 aa, Homo Sapiens
MTKFQEAVTFKDVAVAFTEEELGLLDSAQRKLYRDVMLENFRNLVSVGHQSFKPDMISQLEREEKLWMKELQTQRGKHSGDRNQNEMATLHKAGLRCFSLGELSCWQIKRHIASKLARSQDSMINIEGKSSQFPKHHDSPCQVGAGESIQASVDDNCLVNHIGDHSSIIENQEFPTGKVPNSWSKIYLNETQNYQRSCKQTQMKNKLCIFAPYVDIFSCISHHHDDNIVHKRDKVHSNSDCGKDTLKVSPLTQRSIHTGQKTYQGNECEEAFNDSSSLELHKQVHLGKKSPACSTHEKDTSYSSGIPVQQSVRTGKKRYWCHECGKGFSQSSNLQTHQRVHTGEKPYTCHECGKSFNQSSHLYAHLPIHTGEKPYRCDSCGKGFSRSTDLNIHCRVHTGEKPYKCEVCGKGFTQRSHLQAHERIHTGEKPYKCGDCGKRFSCSSNLHTHQRVHTEEKPYKCDECGKCFSLSFNLHSHQRVHTGEKPYKCEECGKGFSSASSFQSHQRVHTGEKPFRCNVCGKGFSQSSYFQAHQRVHTGEKPYKCEVCGKRFNWSLNLHNHQRVHTGEKPYKCEECGKGFSQASNLQAHQSVHTGEKPFKCDACQKRFSQASHLQAHQRVHTGEKPYKCDTCGKAFSQRSNLQVHQIIHTGEKPFKCEECGKEFSWSAGLSAHQRVHTGEKPYTCQQCGKGFSQASHFHTHQRVHTGERPYICDVCCKGFSQRSHLIYHQRVHTGGNL

SEQ ID NO: 16046 - protein, 1845 aa, Homo Sapiens
MGLCGLLERCWLHHDPDGVLTLNAENTNYAYQVPNFHKCEICLLSFPKESQFQRHMRDHERNDKPHRCDQCPQTFNVEFNLTLHKCTHSGEDPTCPVCNKKFSRVASLKAHIMLHEKEENLICSECGDEFTLQSQLAVHMEEHRQELAGTRQHACKACKKEFETSSELKEHMKTHYKIRVSSTRSYNRNIDRSGFTYSCPHCGKTFQKPSQLTRHIRIHTGERPFKCSECGKAFNQKGALQTHMIKHTGEKPHACAFCPAAFSQKGNLQSHVQRVHSEVKNGPTYNCTECSCVFKSLGSLNTHISKMHMGGPQNSTSSTETAHVLTATLFQTLPLQQTEAQATSASSQPSSQAVSDVIQQLLELSEPAPVESGQSPQPGQQLSITVGINQDILQQALENSGLSSIPAAAHPNDSCHAKTSAPHAQNPDVSSVSNEQTDPTDAEQEKEQESPEKLDKKEKKMIKKKSPFLPGSIREENGVRWHVCPYCAKEFRKPSDLVRHIRIHTHEKPFKCPQCFRAFAVKSTLTAHIKTHTGIKAFKCQYCMKSFSTSGSLKVHIRLHTGVRPFACPHCDKKFRTSGHRKTHIASHFKHTELRKMRHQRKPAKVRVGKTNIPVPDIPLQEPILITDLGLIQPIPKNQFFQSYFNNNFVNEADRPYKCFYCHRAYKKSCHLKQHIRSHTGEKPFKCSQCGRGFVSAGVLKAHIRTHTGLKSFKCLICNGAFTTGGSLRRHMGIHNDLRPYMCPYCQKTFKTSLNCKKHMKTHRYELAQQLQQHQQAASIDDSTVDQQSMQASTQMQVEIESDELPQTAEVVAANPEAMLDLEPQHVVGTEEAGLGQQLADQPLEADEDGFVAPQDPLRGHVDQFEEQSPAQQSFEPAGLPQGFTVTDTYHQQPQFPPVQQLQDSSTLESQALSTSFHQQSLLQAPSSDGMNVTTRLIQESSQEELDLQAQGSQFLEDNEDQSRRSYRCDYCNKGFKKSSHLKQHVRSHTGEKPYKCKLCGRGFVSSGVLKSHEKTHTGVKAFSCSVCNASFTTNGSLTRHMATHMSMKPYKCPFCEEGFRTTVHCKKHMKRHQTVPSAVSATGETEGGDICMEEEEEHSDRNASRKSRPEVITFTEEETAQLAKIRPQESATVSEKVLVQSAAEKDRISELRDKQAELQDEPKHANCCTYCPKSFKKPSDLVRHVRIHTGEKPYKCDECGKSFTVKSTLDCHVKTHTGQKLFSCHVCSNAFSTKGSLKVHMRLHTGAKPFKCPHCELRFRTSGRRKTHMQFHYKPDPKKARKPMTRSSSEGLQPVNLLNSSSTDPNVFIMNNSVLTGQFDQNLLQPGLVGQAILPASVSAGGDLTVSLTDGSLATLEGIQLQLAANLVGPNVQISGIDAASINNITLQIDPSILQQTLQQGNLLAQQLTGEPGLAPQNSSLQTSDSTVPASVVIQPISGLSLQPTVTSANLTIGPLSEQDSVLTTNSSGTQDLTQVMTSQGLVSPSGGPHEITLTINNSSLSQVLAQAAGPTATSSSGSPQEITLTISELNTTSGSLPSTTPMSPSAISTQNLVMSSSGVGGDASVTLTLADTQGMLSGGLDTVTLNITSQGQQFPALLTDPSLSGQGGAGSPQVILVSHTPQSASAACEEIAYQVAGVSGNLAPGNQPEKEGRAHQCLECDRAFSSAAVLMHHSKEVHGRERIHGCPVCRKAFKRATHLKEHMQTHQAGPSLSSQKPRVFKCDTCEKAFAKPSQLERHSRIHTGERPFHCTLCEKAFNQKSALQVHMKKHTGERPYKCAYCVMGFTQKSNMKLHMKRAHSYAGALQESAGHPEQDGEELSRTLHLEEVVQEAAGEWQALTHVF

SEQ ID NO: 16047 - protein, 458 aa, Homo Sapiens
MASTITGSQDCIVNHRGEVDGEPELDISPCQQWGEASSPISRNRDSVMTLQSGCFENIESETYLPLKVSSQIDTQDSSVKFCKNEPQDHQESRRLFVMEESTERKVIKGESCSENLQVKLVSDGQELASPLLNGEATCQNGQLKESLDPIDCNCKDIHGWKSQVVSCSQQRAHTEEKPCDHNNCGKILNTSPDGHPYEKIHTAEKQYECSQCGKNFSQSSELLLHQRDHTEEKPYKCEQCGKGFTRSSSLLIHQAVHTDEKPYKCDKCGKGFTRSSSLLIHHAVHTGEKPYKCDKCGKGFSQSSKLHIHQRVHTGEKPYECEECGMSFSQRSNLHIHQRVHTGERPYKCGECGKGFSQSSNLHIHRCIHTGEKPYQCYECGKGFSQSSDLRIHLRVHTGEKPYHCGKCGKGFSQSSKLLIHQRVHTGEKPYECSKCGKGFSQSSNLHIHQRVHKKDPR

SEQ ID NO: 16048 - protein, 368 aa, Homo Sapiens
MSAQSVEEDSILIIPTPDEEEKILRVKLEEDPDGEEGSSIPWNHLPDPEIFRQRFRQFGYQDSPGPREAVSQLRELCRLWLRPETHTKEQILELVVLEQFVAILPKELQTWVRDHHPENGEEAVTVLEDLESELDDPGQPVSLRRRKREVLVEDMVSQEEAQGLPSSELDAVENQLKWASWELHSLRHCDDDGRTENGALAPKQELPSALESHEVPGTLNMGVPQIFKYGETCFPKGRFERKRNPSRKKQHICDECGKHFSQGSALILHQRIHSGEKPYGCVECGKAFSRSSILVQHQRVHTGEKPYKCLECGKAFSQNSGLINHQRIHTGEKPYECVQCGKSYSQSSNLFRHQRRHNAEKLLNVVKV

SEQ ID NO: 16049 - protein, 579 aa, Homo Sapiens
MNKSQEQVSFKDVCVDFTQEEWYLLDPAQKILYRDVILENYSNLVSVGYCITKPEVIFKIEQGEEPWILEKGFPSQCHPERKWKVDDVLESSQENEDDHFWELLFHNNKTVSVENGDRGSKTFNLGTDPVSLRNYPYKICDSCEMNLKNISGLIISKKNCSRKKPDEFNVCEKLLLDIRHEKIPIGEKSYKYDQKRNAINYHQDLSQPSFGQSFEYSKNGQGFHDEAAFFTNKRSQIGETVCKYNECGRTFIESLKLNISQRPHLEMEPYGCSICGKSFCMNLRFGHQRALTKDNPYEYNEYGEIFCDNSAFIIHQGAYTRKILREYKVSDKTWEKSALLKHQIVHMGGKSYDYNENGSNFSKKSHLTQLRRAHTGEKTFECGECGKTFWEKSNLTQHQRTHTGEKPYECTECGKAFCQKPHLTNHQRTHTGEKPYECKQCGKTFCVKSNLTEHQRTHTGEKPYECNACGKSFCHRSALTVHQRTHTGEKPFICNECGKSFCVKSNLIVHQRTHTGEKPYKCNECGKTFCEKSALTKHQRTHTGEKPYECNACGKTFSQRSVLTKHQRIHTRVKALSTS

SEQ ID NO: 16050 - protein, 456 aa, Homo Sapiens
MNKFQGPVTLKDVIVEFTKEEWKLLTPAQRTLYKDVMLENYSHLVSVGYHVNKPNAVFKLKQGKEPWILEVEFPHRGFPEDLWSIHDLEARYQESQAGNSRNGELTKHQKTHTTEKACECKECGKFFCQKSALIVHQHTHSKGKSYDCDKCGKSFSKNEDLIRHQKIHTRDKTYECKECKKIFYHLSSLSRHLRTHAGEKPYECNQCEKSFYQKPHLTEHQKTHTGEKPFECTECGKFFYVKAYLMVHQKTHTGEKPYECKECGKAFSQKSHLTVHQRMHTGEKPYKCKECGKFFSRNSHLKTHQRSHTGEKPYECKECRKCFYQKSALTVHQRTHTGEKPFECNKCGKTFYYKSDLTKHQRKHTGEKPYECTECGKSFAVNSVLRLHQRTHTGEKPYACKECGKSFSQKSHFIIHQRKHTGEKPYECQECGETFIQKSQLTAHQKTHTKKRNAEK

SEQ ID NO: 16051 - protein, 560 aa, Homo Sapiens
MAAARLLPVPAGPQPLSFQAKLTFEDVAVLLSQDEWDRLCPAQRGLYRNVMMETYGNVVSLGLPGSKPDIISQLERGEDPWVLDRKGAKKSQGLWSDYSDNLKYDHTTACTQQDSLSCPWECETKGESQNTDLSPKPLISEQTVILGKTPLGRIDQENNETKQSFCLSPNSVDHREVQVLSQSMPLTPHQAVPSGERPYMCVECGKCFGRSSHLLQHQRIHTGEKPYVCSVCGKAFSQSSVLSKHRRIHTGEKPYECNECGKAFRVSSDLAQHHKIHTGEKPHECLECRKAFTQLSHLIQHQRIHTGERPYVCPLCGKAFNHSTVLRSHQRVHTGEKPHRCNECGKTFSVKRTLLQHQRIHTGEKPYTCSECGKAFSDRSVLIQHHNVHTGEKPYECSECGKTFSHRSTLMNHERIHTEEKPYACYECGKAFVQHSHLIQHQRVHTGEKPYVCGECGHAFSARRSLIQHERIHTGEKPFQCTECGKAFSLKATLIVHLRTHTGEKPYECNSCGKAFSQYSVLIQHQRIHTGEKPYECGECGRAFNQHGHLIQHQKVHRKL

SEQ ID NO: 16052 - protein, 671 aa, Homo Sapiens
MAATFQLPGHQEMPLTFQDVAVYFSQAEGRQLGPQQRALYRDVMLENYGNVASLGFPVPKPELISQLEQGKELWVLNLLGAEEPDILKSCQKDSEVGTKKELSILNQKFSEEVKTPEFVSRRLLRDNAQAAEFREAWGREGKLKERVGNSAGQSLNKPNIHKRVLTEATVGRERSLGERTQECSAFDRNLNLDQNVVRLQRNKTGERVFKCDICSKTFKYNSDLSRHQRSHTGEKPYECGRCGRAFTHSSNLVLHHHIHTGNKPFKCDECGKTFGLNSHLRLHRRIHTGEKPFGCGECGKAFSRSSTLIQHRIIHTGEKPYKCNECGRGFSQSPQLTQHQRIHTGEKPHECSHCGKAFSRSSSLIQHERIHTGEKPHKCNQCGKAFSQSSSLFLHHRVHTGEKPYVCNECGRAFGFNSHLTEHVRIHTGEKPYVCNECGKAFRRSSTLVQHRRVHTGEKPYQCVECGKAFSQSSQLTLHQRVHTGEKPYDCGDCGKAFSRRSTLIQHQKVHSGETRKCRKHGPAFVHGSSLTADGQIPTGEKHGRAFNHGANLILRWTVHTGEKSFGCNEYGKAFSPTSRPTEDQIMHAGEKPYKCQECGNAFSGKSTLIQHQVTHTGQKPCHCSVYGKAFSQSSQLTPPQQTRVGEKPALNDGSKRYFIHIKKIFQERHF

SEQ ID NO: 16053 - protein, 211 aa, Homo Sapiens
MLRQSCSFPVTSLPALGGVCGREGAGAEVPPAACGCEGRDPDTERSCGRSSTGGCSPCSGPGPSSPRTSRGALSPSLGRLFPHLQVVIKLRIQLAPAVHLALPTCSLLTSSPPLEGCCHRLNEEAEVQRGFRPIAVELEFENQPLGAETRLRNGRRAGVKRSEGRGQVRPGQVRSTGPEGGLTRMERKAARLQWDSGSIKMSENEQLWEEP

SEQ ID NO: 16054 - protein, 499 aa, Homo Sapiens
MGPLQFRDVAIEFSLEEWHCLDTAQRNLYRDVMLENYRNLVFLGIVVSKPDLVTCLEQGKKPLTMERHEMIAKPPVMSSHFAQDLWPENIQNSFQIGMLRRYEECRHDNLQLKKGCKSVGEHKVHKGGYNGLNQCLTTTQKEIFQCDKYGKVFHKFSNSNTYKTRHTGINLFKCIICGKAFKRSSTLTTHKKIHTGEKPYRCEECGKAFNQSANLTTHKRIHTGEKPYRCEECGKAFKQSSNLTTHKKIHTGEKPYKCEECGKAFNRSTDLTTHKIVHTGEKPYKCEECGKAFKHPSHVTTHKKIHTRGKPYNCEECGKSFKHCSNLTIHKRIHTGEKPYKCEECGKAFHLSSHLTTHKILHTGEKPYRCRECGKAFNHSTTLFSHEKIHTGEKPYKCDECGKTFTWPSILSKHKRTHTGEKPYKCEECGKSFTASSTLTTHKRIHTGEKPYKCEECGKAFNWSSDLNKHKKIHIERKPYIVKNVTDLLNVPPLLISIR

SEQ ID NO: 16055 - protein, 659 aa, Homo Sapiens
MPGPPRSLEMGLLTFRDVAIEFSLEEWQHLDIAQQNLYRNVMLENYRNLAFLGIAVSKPDLITCLEQGKEPWNMKRHEMVDEPPGMCPHFAQDLWPEQGMEDSFQKAILRRYGKYGHENLQLRKGCKSVDEYKVNKEGYNGLNQCFTTAQSKVFQCDKYLKVFYKFLNSNRPKIRHTEKKSFKCKKRVKLFCMLSHKTQHKSIYHREKSYKCKECGKTFNWSSTLTNHRKIYTEEKPYKCEEYNKSPKQLSTLTTHEIIHAGEKLYKCEECGEAFNRSSNLTTHKIIHTGEKPYKCEECGKAFIWSSTLTEHKKIHTRKKPYKCEECGKAFIWSSTLTRHKRMHTGEKPYKCEECGKAFSQSSTLTTHKIIHTGEKRYKCLECGKAFKQLSTLTTHKIIHVGEKLYKCEECGKGFNRSSNLTTHKIIHTGEKPYKCEECGKAFIWSSTLTKHKRIHTREKPYKCEECGKAFIWSSTLTRHKRMHTGEKPYKCEECGKSFSQSSTLTTHKIIHTGEKPYKCEECGKAFNWSSTLTKHKIIHTEEKPYKCEKCGKAFKQSSILTNHKRIHTGEKPYKCEECGKSFNRSSTFTKHKVIHTGVKPYKCEECGKAFFWSSTLTKHKRIHTGEQPYKWEKFGKAFNRSSHLTTDKITHWREILQV

SEQ ID NO: 16056 - protein, 627 aa, Homo Sapiens
MAAAELTAPAQGIVTFEDVAVYFSWKEWGLLDEAQKCLYHDVMLENLTLTTSLGGSGAGDEEAPYQQSTSPQRVSQVRIPKALPSPQKTNPCEICGPVLRQILHLVEHQGTHHGQKLYTDGACRKQLQFTAYLHQHQKQHVGQKHFRSNGGRDMFLSSCTFEVSGKPFTCKEVGKDFLVRSRFLQQQAAHTRKKSNRTKSAVAFHSVKNHYNWGECVKAFSYKHVRVQHQGDLIRERSYMCSECGKSFSTSCSLSDHLRVHTSEKPYTCGECGKSYRQSSSLITHRRIHTGVRPHQCDECGKLFNRKYDLLIHQRVHTGERPYKCSECGKSFSHSSSLITHQRIHTGMRPYECSECGKSFIHSSSLITHQRVHTGTRPYMCSECGKSFSQSCHLIKHRRLHIGEGPYECSECGKLFTYRSRFFQHQRVHTGVRSHECHECGKLFSRKFDLIVHERVHTGERPYECSECGKSFTCKSYLISHWKVHTGARPYECGECGKSFTHSSTLLQHQRVHTGERPYECNECGKFFSQSSSLIRHRRSHTGERPYECSECWKSFSNHSSLVKHRRVHTGERPYECSECGKSFSQSSNLTNHQRIHSGERPYECSDCGKFFTFNSNLLKHQNVHKG

SEQ ID NO: 16057 - protein, 563 aa, Homo Sapiens
MGPLTIRDVTVEFSLEEWHCLDTAQQNLYRDVMLENYRNLVFLGIAVSKPDLITCLEQGKEPCNMKRHEMVAKPPVMCSHIAEDLCPERDIKYFFQKVILRRYDKCEHENLQLRKGCKSVDECKVCKGGYNGLNQCLITTQSKMYQCDKYVKVFYKFSNSDRHKIRHTEKKTCKCKECGKSFCMLSQLTRHKRIHIRENSHKCEECGKAFNQSSALTRHKMTHTGEKPYKCEECGKAFNRSSHLTQHKVIHTREKPYKCEECGKAFNRSSHITQHKRIHNREKPFKYDECCKAFKWSSALTTLTQHKRIHTGEKPYKCEECGKAFNQSSALTRHKMIHTGEKPFQCEECGKAFNRSSHLTQHKIIHTKEKPYKCEECGKAFNRSSHLTKHKRIHTREKAYKCDEYCKAFNWSSALTTLTQHKIIHTGEKPYKCEECGKAFNRSSYLIRHKIIHTGEKPYKCEECGKAFNQSSHLTQHKIIHTGEKPYKCEECGKAFNRSSHLSQHKIIHTGEKPYKCEECGKPFNRFSYLTVHKRIHAGENPNKYEECGKACNHSSNLTKHNS

SEQ ID NO: 16058 - protein, 533 aa, Homo Sapiens; identical to SEQ ID NO: 14404

SEQ ID NO: 16059 - protein, 412 aa, Homo Sapiens
MIGMLESLQHESDLLQHDQIHTGEKPYECNECRKTFSLKQNLVEHKKMHTGEKSHECTECGKVCSRVSSLTLHLRSHTGKKAYKCNKCGKAFSQKENFLSHQKHHTGEKPYECEKVSIQMPTIIRHQKNHTGTKPYACKECGKAFNGKAYLTEHEKIHTGEKPFECNQCGRAFSQKQYLIKHQNIHTGKKPFKCSECGKAFSQKENLIIHQRIHTGEKPYECKGCGKAFIQKSSLIRHQRSHTGEKPYTCKECGKAFSGKSNLTEHEKIHIGEKPYKCNECGTIFRQKQYLIKHHNIHTGEKPYECNKCGKAFSRITSLIVHVRIHTGDKPYECKVCGKAFCQSSSLTVHMRSHTGEKPYGCNECGKAFSQFSTLALHMRIHTGEKPYQCSECGKAFSQKSHHIRHQRIHTH

SEQ ID NO: 16060 - protein, 683 aa, Homo Sapiens
MASGPGSQEREGLLIVKLEEDCAWSQELPPPDPGPSPEASHLRFRRFRFQEAAGPREALSRLQELCHGWLRPEMRTKEQILELLVLEQFLTILPQEIQSRVQELHPESGEEAVTLVEDMQRELGRLRQQVTNHGRGTEVLLEEPLPLETARESPSFKLEPMETERSPGPRLQELLGPSPQRDPQAVKERALSAPWLSLFPPEGNMEDKEMTGPQLPESLEDVAMYISQEEWGHQDPSKRALSRDTVQESYENVDSLESHIPSQEVPGTQVGQGGKLWDPSVQSCKEGLSPRGPAPGEEKFENLEGVPSVCSENIHPQVLLPDQARGEVPWSPELGRPHDRSQGDWAPPPEGGMEQALAGASSGRELGRPKELQPKKLHLCPLCGKNFSNNSNLIRHQRIHAAERLCMGVDCTEIFGGNPRFLSLHRAHLGEEAHKCLECGKCFSQNTHLTRHQRTHTGEKPYQCNICGKCFSCNSNLHRHQRTHTGEKPYKCPECGEIFAHSSNLLRHQRIHTGERPYKCPECGKSFSRSSHLVIHERTHERERLYPFSECGEAVSDSTPFLTNHGAHKAEKKLFECLTCGKSFRQGMHLTRHQRTHTGEKPYKCTLCGENFSHRSNLIRHQRIHTGEKPYTCHECGDSFSHSSNRIRHLRTHTGERPYKCSECGESFSRSSRLMSHQRTHTG

SEQ ID NO: 16061 - protein, 627 aa, Homo Sapiens
MAAAVLTDRAQVSVTFDDVAVTFTKEEWGQLDLAQRTLYQEVMLENCGLLVSLGCPVPKAELICHLEHGQEPWTRKEDLSQDTCPGDKGKPKTTEPTTCEPALSEGISLQGQVTQGNSVDSQLGQAEDQDGLSEMQEGHFRPGIDPQEKSPGKMSPECDGLGTADGVCSRIGQEQVSPGDRVRSHNSCESGKDPMIQEEENNFKCSECGKVFNKKHLLAGHEKIHSGVKPYECTECGKTFIKSTHLLQHHMIHTGERPYECMECGKAFNRKSYLTQHQRIHSGEKPYKCNECGKAFTHRSNFVLHNRRHTGEKSFVCTECGQVFRHRPGFLRHYVVHSGENPYECLECGKVFKHRSYLMWHQQTHTGEKPYECSECGKVFLESAALIHHYVIHTGEKPFECLECGKAFNHRSYLKRHQRIHTGEKPFVCSECGKAFTHCSTFILHKRAHTGEKPFECKECGKAFSNRKDLIRHFSIHTGEKPYECVECGKAFTRMSGLTRHKRIHSGEKPYECVECGKSFCWSTNLIRHAIIHTGEKPYKCSECGKAFSRSSSLTQHQRMHTGKNPISVTDVGRPFTSGQTSVTLRELLLGKDFLNVTTEANILPEETSSSASDQPYQRETPQVSSL

SEQ ID NO: 16062 - protein, 549 aa, Homo Sapiens
MLENYKNLATVGYQLFKPSLISWLEQEESRTVQRGDFQASEWKVQLKTKELALQQDVLGEPTSSGIQMIGSHNGGEVSDVKQCGDVSSEHSCLKTHVRTQNSENTFECYLYGVDFLTLHKKTSTGEQRSVFSQCGKAFSLNPDVVCQRTCTGEKAFDCSDSGKSFINHSHLQGHLRTHNGESLHEWKECGRGFIHSTDLAVRIQTHRSEKPYKCKECGKGFRYSAYLNIHMGTHTGDNPYECKECGKAFTRSCQLTQHRKTHTGEKPYKCKDCGRAFTVSSCLSQHMKIHVGEKPYECKECGIAFTRSSQLTEHLKTHTAKDPFECKICGKSFRNSSCLSDHFRIHTGIKPYKCKDCGKAFTQNSDLTKHARTHSGERPYECKECGKAFARSSRLSEHTRTHTGEKPFECVKCGKAFAISSNLSGHLRIHTGEKPFECLECGKAFTHSSSLNNHMRTHSAKKPFTCMECGKAFKFPTCVNLHMRIHTGEKPYKCKQCGKSFSYSNSFQLHERTHTGEKPYECKECGKAFSSSSSFRNHERRHADERLSA

SEQ ID NO: 16063 - protein, 743 aa, Homo Sapiens
MGLLTFRDVAVEFSLEEWEHLEPAQKNLYQDVMLENYRNLVSLGLVVSKPDLITFLEQRKEPWNVKSEETVAIQPDVFSHYNKDLLTEHCTEASFQKVISRRHGSCDLENLHLRKRWKREECEGHNGCYDEKTFKYDQFDESSVESLFHQQILSSCAKSYNFDQYRKVFTHSSLLNQQEEIDIWGKHHIYDKTSVLFRQVSTLNSYRNVFIGEKNYHCNNSEKTLNQSSSPKNHQENYFLEKQYKCKEFEEVFLQSMHGQEKQEQSYKCNKCVEVCTQSLKHIQHQTIHIRENSYSYNKYDKDLSQSSNLRKQIIHNEEKPYKCEKCGDSLNHSLHLTQHQIIPTEEKPCKWKECGKVFNLNCSLYLTKQQQIDTGENLYKCKACSKSFTRSSNLIVHQRIHTGEKPYKCKECGKAFRCSSYLTKHKRIHTGEKPYKCKECGKAFNRSSCLTQHQTTHTGEKLYKCKVCSKSYARSSNLIMHQRVHTGEKPYKCKECGKVFSRSSCLTQHRKIHTGENLYKCKVCAKPFTCFSNLIVHERIHTGEKPYKCKECGKAFPYSSHLIRHHRIHTGEKPYKCKACSKSFSDSSGLTVHRRTHTGEKPYTCKECGKAFSYSSDVIQHRRIHTGQRPYKCEECGKAFNYRSYLTTHQRSHTGERPYKCEECGKAFNSRSYLTTHRRRHTGERPYKCDECGKAFSYRSYLTTHRRSHSGERPYKCEECGKAFNSRSYLIAHQRSHTREKL

SEQ ID NO: 16064 - protein, 947 aa, Homo Sapiens
MATRVRTASIWVPPLQERNSSWDRIRKLQGQESILGQGTPGLQPLPGTPRQKQKSRRIEKVLEWLFISQEQPKITKSWGPLSFMDVFVDFTWEEWQLLDPAQKCLYRSVMLENYSNLVSLGYQHTKPDIIFKLEQGEELCMVQAQVPNQTCPNTVWKIDDLMDWHQENKDKLGSTAKSFECTTFGKLCLLSTKYLSRQKPHKCGTHGKSLKYIDFTSDYARNNPNGFQVHGKSFFHSKHEQTVIGIKYCESIESGKTVNKKSQLMCQQMYMGEKPFGCSCCEKAFSSKSYLLVHQQTHAEEKPYGCNECGKDFSSKSYLIVHQRIHTGEKLHECSECRKTFSFHSQLVIHQRIHTGENPYECCECGKVFSRKDQLVSHQKTHSGQKPYVCNECGKAFGLKSQLIIHERIHTGEKPYECNECQKAFNTKSNLMVHQRTHTGEKPYVCSDCGKAFTFKSQLIVHQGIHTGVKPYGCIQCGKGFSLKSQLIVHQRSHTGMKPYVCNECGKAFRSKSYLIIHTRTHTGEKLHECNNCGKAFSFKSQLIIHQRIHTGENPYECHECGKAFSRKYQLISHQRTHAGEKPYECTDCGKAFGLKSQLIIHQRTHTGEKPFECSECQKAFNTKSNLIVHQRTHTGEKPYSCNECGKAFTFKSQLIVHKGVHTGVKPYGCSQCAKTFSLKSQLIVHQRSHTGVKPYGCSECGKAFRSKSYLIIHMRTHTGEKPHECRECGKSFSFNSQLIVHQRIHTGENPYECSECGKAFNRKDQLISHQRTHAGEKPYGCSECGKAFSSKSYLIIHMRTHSGEKPYECNECGKAFIWKSLLIVHERTHAGVNPYKCSQCEKSFSGKLRLLVHQRMHTREKPYECSECGKAFIRNSQLIVHQRTHSGEKPYGCNECGKTFSQKSILSAHQRTHTGEKPCKCTECGKAFCWKSQLIMHQRTHVDDKH

SEQ ID NO: 16065 - protein, 569 aa, Homo Sapiens
MSSAPRGPPSVAPLPAGIGRSTAKTPGLPGSLEMGPLTFRDVAIEFSLEEWQCLDTSQQNLYRNVMLDNYRNLVFLGIAVSKPDLITCLEQGKEPCNMKRHAMVAKPPVVCSHFAQDLWPKQGLKDSFQKVILRRYGKYGHENLQLRKGCKSADEHKVHKRGYNGLNQCLTTTQSKIFQCDKYVKVLHKFSNSNIHKKRQTGKKPFKCKECGKSCCILSQLTQHKKTATRVNFYKCKTCGKAFNQFSNLTKHKIIHPEVNPYKCEECGKAFNQSLTLTKHKKIHTEEKPYKCEDCGKVFSVFSVLTKHKIIHTGTKPYNCEECGKGFSIFSTLTKHKIIHTGEKPYKCNECGKAFNWSSTLTKHKRIHTGEKPYKCEECGKAFNQSSTLTRHKIVHTGEKPYKCEECGKAFKRSTTLTKHKRIYTKEKPYKCEECGKAFSVFSTLTKHKIIHTGAKPYKCEECGSAFRAFSTLTEHKRVHTGEKPYKCNECGKAFNWSSTLTKHKRIHTGEKPYKCEECGKAFNRSSNLTRHKKIHTGEKPYKPKRCDSAFDNTPNFSRHKRNHMGEKS

SEQ ID NO: 16066 - protein, 653 aa, Homo Sapiens
MASRLPTAWSCEPVTFEDVTLGFTPEEWGLLDLKQKSLYREVMLENYRNLVSVEHQLSKPDVVSQLEEAEDFWPVERGIPQDTIPEYPELQLDPKLDPLPAESPLMNIEVVEVLTLNQEVAGPRNAQIQALYAEDGSLSADAPSEQVQQQGKHPGDPEAARQRFRQFRYKDMTGPREALDQLRELCHQWLQPKARSKEQILELLVLEQFLGALPVKLRTWVESQHPENCQEVVALVEGVTWMSEEEVLPAGQPAEGTTCCLEVTAQQEEKQEDAAICPVTVLPEEPVTFQDVAVDFSREEWGLLGPTQRTEYRDVMLETFGHLVSVGWETTLENKELAPNSDIPEEEPAPSLKVQESSRDCALSSTLEDTLQGGVQEVQDTVLKQMESAQEKDLPQKKHFDNRESQANSGALDTNQVSLQKIDNPESQANSGALDTNQVLLHKIPPRKRLRKRDSQVKSMKHNSRVKIHQKSCERQKAKEGNGCRKTFSRSTKQITFIRIHKGSQVCRCSECGKIFRNPRYFSVHKKIHTGERPYVCQDCGKGFVQSSSLTQHQRVHSGERPFECQECGRTFNDRSAISQHLRTHTGAKPYKCQDCGKAFRQSSHLIRHQRTHTGERPYACNKCGKAFTQSSHLIGHQRTHNRTKRKKKQPTS

SEQ ID NO: 16067 - protein, 429 aa, Homo Sapiens
MMSHPCVSLLGVPVLNPALVPHLAQGQVLLVSDPSPNTDPAKYSESTSATRHQMKGEDAQPQEMASTSFPRASGPSPEFRQHGDSDGKRGSPQNLPIEHHFACKECGDTFRLKVLLVQHQRVHSEEKGWECGDCGKVFRGVAEFNEHRKSHVAAEPQPGPSRALENAAEKREQMEREAKPFECEECGKRFKKNAGLSQHLRVHSREKPFDCEECGRSFKVNTHLFRHQKLHTSEKPFACKACSRDFLDRQELLKHQRMHTGHLPFDCDDCGKSFRGVNGLAEHQRIHSGAKPYGCPHCGKLFRRSSELTKHRRIHTGEKPYACGQCGKAFRQSSSLLEHARIHSGERPYACGECGKAFRGPSDLIKHRRIHSGLKPYECDKCGKAFRRSSGLSRHRRIHSGARRCECSQCGRVFKRRSALQKHQPTHHE

SEQ ID NO: 16068 - protein, 614 aa, Homo Sapiens
MKRDRLGRFLSPGSSRQCGASDGGGGVSRTRGRPSLSGGPRVDGATARRAWGPVGSCGDAGEDGADEAGAGRALAMGHCRLCHGKFSSRSLRSISERAPGASMERPSAEERVLVRDFQRLLGVAVRQDPTLSPFVCKSCHAQFYQCHSLLKSFLQRVNASPAGRRKPCAKVGAQPPTGAEEGACLVDLITSSPQCLHGLVGWVHGHAASCGALPHLQRTLSSEYCGVIQVVWGCDQGHDYTMDTSSSCKAFLLDSALAVKWPWDKETAPRLPQHRGWNPGDAPQTSQGRGTGTPVGAETKTLPSTDVAQPPSDSDAVGPRSGFPPQPSLPLCRAPGQLGEKQLPSSTSDDRVKDEFSDLSEGDVLSEDENDKKQNAQSSDESFEPYPERKVSGKKSESKEAKKSEEPRIRKKPGPKPGWKKKLRCEREELPTIYKCPYQGCTAVYRGADGMKKHIKEHHEEVRERPCPHPGCNKVFMIDRYLQRHVKLIHTEVRNYICDECGQTFKQRKHLLVHQMRHSGAKPLQCEVCGFQCRQRASLKYHMTKHKAETELDFACDQCGRRFEKAHNLNVHMSMVHPLTQTQDKALPLEAEPPPGPPSPSVTTEGQAVKPEPT

SEQ ID NO: 16069 - protein, 450 aa, Homo Sapiens
MAASKTQGAVARMQEDRDGSCSTVGGVGYGDSKDCILEPLSLPESPGGTTTLEGSPSVPCIFCEEHFPVAEQDKLLKHMIIEHKIVIADVKLVADFQRYILYWRKRFTEQPITDFCSVIRINSTAPFEEQENYFLLCDVLPEDRILREELQKQRLREILEQQQQERNDTNFHGVCMFCNEEFLGNRSVILNHMAREHAFNIGLPDNIVNCNEFLCTLQKKLDNLQCLYCEKTFRDKNTLKDHMRKKQHRKINPKNREYDRFYVINYLELGKSWEEVQLEDDRELLDHQEDDWSDWEEHPASAVCLFCEKQAETIEKLYVHMEDAHEFDLLKIKSELGLNFYQQVKLVNFIRRQVHQCRCYGCHVKFKSKADLRTHMEETKHTSLLPDRKTWDQLEYYFPTYENDTLLCTLSDSESDLTAQEQNENVPIISEDTSKLYALKQSSILNQLLL

SEQ ID NO: 16070 - protein, 718 aa, Homo Sapiens
MALPQGLLTFRDVAIEFSQEEWKCLDPAQRTLYRDVMLENYRNLVSLDISSKCMMKTFFSTGQGNTEAFHTGTLQRQASHHIGDFCFQKIEKDIHGFQFQWKEDETNDHAAPMTEIKELTGSTGQHDQRHAGNKHIKDQLGLSFHSHLPELHIFQPEGKIGNQVEKSINNASSVSTSQRICCRPKTHISNKYGNNSLHSSLLTQKRNVHMREKSFQCIESGKSFNCSSLLKKHQITHLEEKQCKCDVYGKVFNQKRYLACHRRSHIDEKPYKCNECGKIFGHNTSLFLHKALHTADKPYECEECDKVFSRKSHLETHKIIYTGGKPYKCKVCDKAFTCNSYLAKHTIIHTGEKPYKCNECGKVFNRLSTLARHRRLHTGEKPYECEECEKVFSRKSHLERHKRIHTGEKPYKCKVCDKAFAYNSYLAKHSIIHTGEKPYKCNECGKVFNQQSTLARHHRLHTAEKPYKCEECDKVFRCKSHLERHRRIHTGEKPYKCKVCDKAFRSDSCLTEHQRVHTGEKPYMCNECGKVFSTKANLACHHKLHTAEKPYKCEECEKVFSRKSHMERHRRIHTGEKPYKCKVCDKAFRRDSHLAQHQRVHTGEKPYKCNECGKTFRQTSSLIIHRRLHTGEKPYKCNECGKTFSQMSSLVYHHRLHSGEKPYKCNECGKVFNQQAHLAQHQRVHTGEKPYKCNECGKTFSQMSNLVYHHRLHSGEKP

SEQ ID NO: 16071 - protein, 542 aa, Homo Sapiens
MGDIFLCKKVESPKKNLRESKQREEDDEDPDLIYVGVEHVHRDAEVLFVGMISNSKPVVSNILNRVTPGSKSRRKKGHFRQYPAHVSQPANHVTSMAKAIMPVSLSEGRSTDSPVTMKSSSEPGYKMSSPQVVSPNYSDSLPPGTQCLVGAMVSGGGRNESSPDSKRLSTSDINSRDSKRVKLRDGIPGVPSLAVVPSDMSSTISTNTPSQGICNSSNHVQNGVTFPWPDANGKAHFNLTDPERANESGLAMTDISSLASQNKTFDPKKENPIVLLSNFYYGQHKGDGQPEQKTHTTFKCLSCVKVLKNIKFMNHMKHHLEFEKQRNDSWEDHTTCQHCHRQFPTPFQLQCHIDSVHIAMGPSAVCKICELSFETDQVLLQHMKDHHKPGEMPYVCQVCHYRSSVFADVETHFRTCHENTKNLLCLFCLKLFKTAIPYMNHCWRHSRRRVLQCSKCRLQFLTLKEEIEHKTKDHQTFKKPEQLQGFPRETKVIIQTSVQPGSSGMASVIVSNTDPQSSPVKTKKKTAMNTRDSRLPCSKDSS

SEQ ID NO: 16072 - protein, 543 aa, Homo Sapiens
MEQSCEEEKEPEPQKNIQETKQVDDEDAELIFVGVEHVNEDAELIFVGVTSNSKPVVSNILNRVTPGSWSRRKKYDHLRKDTARKLQPKSHETVTSEAVTVLPASQLESRSTDSPIIIEPLSKPDYRNSSPQVVPNNSSELPSPLITFTDSLHHPVSTALSVGGINESPRVSKQLSTFEVNSINPKRAKLRDGIIEGNSSASFPSDTFHTMNTQQSTPSNNVHTSLSHVQNGAPFPAAFPKDNIHFKPINTNLDRENELAKTDILSLTSQNKTFDPKKENPIVLLSDFYYGQHKGEGQPEQKTHTTFKCLSCVKVLKNVKFMNHVKHHLEFEKQRNDSWENHTTCQHCHRQFPTPFQLQCHIENVHTAQEPSTVCKICELSFETDQVLLQHMKDHHKPGEMPYVCQVCHYRSSVFADVETHFRTCHENTKNLLCPFCLKIFKTATPYMCHYRGHWGKSAHQCSKCRLQFLTFKEKMEHKTQCHQMFKKPKQLEGLPPETKVTIQVSLEPLQPGSVDVASITVSTSDSEPSLPRSKSKISKKSH

SEQ ID NO: 16073 - protein, 737 aa, Homo Sapiens
MDDDKPFQPKNISKMAELFMECEEEELEPWQKKVEETQDEDDDELIFVGEISSSKPAISNILNRGHSSSSSKGIKSEPHSPGIPEIFRTASQRCRDPPSNPVAASPRFHLVSKSSQSSVTVENASKPDFTKNSQVGSDNSSILLFDSTQESLPPSQDIPAIFREGMKNTSYVLKHPSTSKVNSVTPKKPKTSEDVPQINPSTSLPLIGSPPVTSSQVMLSKGTNTSSPYDAGADYLRACPKCNVQFNLLDPLKYHMKHCCPDMITKFLGVIVKSERPCDEDKTDSETGKLIMLVNEFYYGRHEGVTEKEPKTYTTFKCFSCSKVLKNNIRFMNHMKHHLELEKQNNESWENHTTCQHCYRQYPTPFQLQCHIESTHTPHEFSTICKICELSFETEHILLQHMKDTHKPGEMPYVCQVCQFRSSTFSDVEAHFRAAHENTKNLLCPFCLKVSKMATPYMNHYMKHQKKGVHRCPKCRLQFLTSKEKAEHKAQHRTFIKPKELEGLPPGAKVTIRASLGPLQSKLPTAPFGCAPGTSFLQVTPPTSQNTTARNPRKSNASRSKTSKLHATTSTASKVNTSKPRGRIAKSKAKPSYKQKRQRNRKNKMSLALKNIRCRRGIHKCIECHSKIKDFASHFSIYIHCSFCKYNTNCNKAFVNHMMSSHSNHPGKRFCIFKKHSGTLRGITLVCLKCDFLADSSGLDRMAKHLSQRKTHTCQVIIENVSKSTSTSEPTTGCSLK

SEQ ID NO: 16074 - protein, 979 aa, Homo Sapiens
MGDNPFQPKSNSKMAELFMECEEEELEPWQKKVKEVEDDDDDEPIFVGEISSSKPAISNILNRVNPSSYSRGLKNGALSRGITAAFKPTSQHYTNPTSNPVPASPINFHPESRSSDSSVIVQPFSKPGYITNSSRVVSNKSSELLFDLTQDTGLSHYQGGPTLSMAGMSESSFLSKRPSTSEVNNVNPKKPKPSESVSGANSSAVLPSVKSPSVTSSQAMLAKGTNTSSNQSKNGTPFPRACPKCNIHFNLLDPLKNHMKYCCPDMINNFLGLAKTEFSSTVNKNTTIDSEKGKLIMLVNDFYYGKHEGDVQEEQKTHTTFKCFSCLKILKNNIRFMNHMKHHLELEKQSSESWENHTTCQHCYRQFPTPFQLQCHIESTHTPHEFSTICKICELSFETEHVLLQHMKDNHKPGEMPYVCQVCNYRSSSFSDVETHFRTSHENTKNLLCPFCLKVIKIATPYMHHYMKHQKKGIHRCTKCRLQFLTCKEKMDHKTQHHRTFIKPKQLEGLPPGTKVTIRASVGPLQSGASPTPSISASASTLQLSPPRTKNITAKNPAKSNTSKPNTVKSNASKPNTSKPNGSKSKYKPKISNMQKKQSTLASSNKKSKVNTALRNLRYRRGIHKCIECCSEIKDFANHFPTYVHCSFCRYNTSCSKAYVNHMMSFHSNRPSKRFCIFKKHSENLRGITLVCLNCDFLSDVSGLDNMATHLSQHKTHTCQVVMQKVSVCIPTSEHLSELKKEAPAKEQEPVSKEIARPNMAERETETSNSESKQDKAASSKEKNGCNANSFEGSSTTKSEESITVSDKENETCLADQETGSKNIVSCDSNIGADKVEKKKQIQHVCQEMELKMCQSSENIILSDQIKDHNSSEARFSSKNIKDLRLASDNVSIDQFLRKRHEPESVSSDVSEQGSIHLEPLTPSEVLEYEATEILQKGSGDPSAKTDEVVSDQTDDIPGGNNPSTTEATVDLEDEKERS

SEQ ID NO: 16075 - protein, 895 aa, Homo Sapiens
MKIGSGFLSGGGGTGSSGGSGSGGGGSGGGGGGGSSGRRAEMEPTFPQGMVMFNHRLPPVTSFTRPAGSAAPPPQCVLSSSTSAAPAAEPPPPPAPDMTFKKEPAASAAAFPSQRTSWGFLQSLVSIKQEKPADPEEQQSHHHHHHHHYGGLFAGAEERSPGLGGGEGGSHGVIQDLSILHQHVQQQPAQHHRDVLLSSSSRTDDHHGTEEPKQDTNVKKAKRPKPESQGIKAKRKPSASSKPSLVGDGEGAILSPSQKPHICDHCSAAFRSSYHLRRHVLIHTGERPFQCSQCSMGFIQKYLLQRHEKIHSREKPFGCDQCSMKFIQKYHMERHKRTHSGEKPYKCDTCQQYFSRTDRLLKHRRTCGEVIVKGATSAEPGSSNHTNMGNLAVLSQGNTSSSRRKTKSKSIAIENKEQKTGKTNESQISNNINMQSYSVEMPTVSSSGGIIGTGIDELQKRVPKLIFKKGSRKNTDKNYLNFVSPLPDIVGQKSLSGKPSGSLGIVSNNSVETIGLLQSTSGKQGQISSNYDDAMQFSKKRRYLPTASSNSAFSINVGHMVSQQSVIQSAGVSVLDNEAPLSLIDSSALNAEIKSCHDKSGIPDEVLQSILDQYSNKSESQKEDPFNIAEPRVDLHTSGEHSELVQEENLSPGTQTPSNDKASMLQEYSKYLQQAFEKSTNASFTLGHGFQFVSLSSPLHNHTLFPEKQIYTTSPLECGFGQSVTSVLPSSLPKPPFGMLFGSQPGLYLSALDATHQQLTPSQELDDLIDSQKNLETSSAFQSSSQKLTSQKEQKNLESSTGFQIPSQELASQIDPQKDIEPRTTYQIENFAQAFGSQFKSGSRVPMTFITNSNGEVDHRVRTSVSDFSGYTNMMSDVSEPCSTRVKTPTSQSYR

SEQ ID NO: 16076 - protein, 671 aa, Homo Sapiens
MQFVSTRPQPQQLGIQGLGLDSGSWSWAQALPPEEVCHQEPALRGEMAEGMPPMQAQEWDMDARRPMPFQFPPFPDRAPVFPDRMMREPQLPTAEISLWTVVAAIQAVERKVDAQASQLLNLEGRTGTAEKKLADCEKTAVEFGNHMESKWAVLGTLLQEYGLLQRRLENLENLLRNRNFWVLRLPPGSKGEAPKVPVTFVDIAVYFSEDEWKNLDEWQKELYNNLVKENYKTLMSLDAEGSVPKPDAPVQAEPREEPCVWEQRHPEEREIPMDPEAGAEPLVPAQDASSQVKREDTLCVRGQRGLEERAIPTESITDSPISAQDLLSRIKQEEHQCVWDQQDLADRDIPTDPNSESLISAHDILSWIKQEEQPYPWGPRDSMDGELGLDSGPSDSLLMVKNPPPAPPQPQPQPQPPQPQLQSQPQPQSLPPIAVAENPGGPPSRGLLDDGFQVLPGERGSGEAPPGGDRSTGGGGGDGGGGGGGAEAGTGAGGGCGSCCPGGLRRSLLLHGARSKPYSCPECGKSFGVRKSLIIHHRSHTKERPYECAECEKSFNCHSGLIRHQMTHRGERPYKCSECEKTYSRKEHLQNHQRLHTGERPFQCALCGKSFIRKQNLLKHQRIHTGERPYTCGECGKSFRYKESLKDHLRVHSGGPGPGAPRQLPPPPERD

SEQ ID NO: 16077 - protein, 679 aa, Homo Sapiens
MESRSVAQAGVQWCDLGSLQAPPPGFTLFSCLSLLSSWDYSSGFSGFCASPIEESHGALISSCNSRTMTDGLVTFRDVAIDFSQEEWECLDPAQRDLYVDVMLENYSNLVSLDLESKTYETKKIFSENDIFEINFSQWEMKDKSKTLGLEASIFRNNWKCKSIFEGLKGHQEGYFSQMIISYEKIPSYRKSKSLTPHQRIHNTEKSYVCKECGKACSHGSKLVQHERTHTAEKHFECKECGKNYLSAYQLNVHQRFHTGEKPYECKECGKTFSWGSSLVKHERIHTGEKPYECKECGKAFSRGYHLTQHQKIHTGVKSYKCKECGKAFFWGSSLAKHEIIHTGEKPYKCKECGKAFSRGYQLTQHQKIHTGKKPYECKICGKAFCWGYQLTRHQIFHTGEKPYECKECGKAFNCGSSLIQHERIHTGEKPYECKECGKAFSRGYHLSQHQKIHTGEKPFECKECGKAFSWGSSLVKHERVHTGEKSHECKECGKTFCSGYQLTRHQVFHTGEKPYECKECGKAFNCGSSLVQHERIHTGEKPYECKECGKAFSRGYHLTQHQKIHTGEKPFKCKECGKAFSWGSSLVKHERVHTNEKSYECKDCGKAFGSGYQLSVHQRFHTGEKLYQRKEFGKTFTCGSKLVHERTHSNDKPYKYNECGEAFLWTTYSNEKIDTDETL

SEQ ID NO: 16078 - protein, 593 aa, Homo Sapiens
MTMFKEAVTFKDVAVVFTEEELGLLDVSQRKLYRDVMLENFRNLLSVGHQLSHRDTFHFQREEKFWIMETATQREGNSGGKIQTELESVPETGPHEEWSCQQIWEQTASELTRPQDSISSSQFSTQGDVPSQVDAGLSIIHIGETPSEHGKCKKFFSDVSILDLHQQLHSGKISHTCNEYRKRFCYSSALCLHQKVHMGEKRYKCDVCSKAFSQNSQLQTHQRIHTGEKPFKCEQCGKSFSRRSGMYVHCKLHTGEKPHICEECGKAFIHNSQLREHQRIHTGEKPFKCYICGKSFHSRSNLNRHSMVHMQEKSFRCDTCSNSFGQRSALNSHCMDHTKEKLYKCEECGRSFTCRQDLCKHQMDHTGDKPYNCNVCGKGFRWSSCLSRHQRVHNGETTFKCDGCGKRFYMNSQGHSHQRAYREEELYKCQKCGKGYISKFNLDLHQRVHTGERPYNCKECGKSFRWASGILRHKRLHTGEKPFKCEECGKRFTENSKLRFHQRIHTGEKPYKCEECGKGFRWASTHLTHQRLHSREKLFQCEDCGKSSEHSSCLQDQQSDHSGEKTSKCEDCGKRYERRLNLDMILSLFLNDI

SEQ ID NO: 16079 - protein, 590 aa, Homo Sapiens
MIKFQERVTFKDVAVVFTKEELALLDKAQINLYQDVMLENFRNLMLVRDGIKNNILNLQAKGLSYLSQEVLHCWQIWKQRIRDLTVSQDYIVNLQEECSPHLEDVSLSEEWAGISLQISENENYVVNAIIKNQDITAWQSLTQVLTPESWRKANIMTEPQNSQGRYKGIYMEEKLYRRAQHDDSLSWTSCDHHESQECKGEDPGRHPNCGKNLGMKSTVEKRNAAHVLPQPFPCNNCGVAFADDTDPHVHHSTHLGEKSYKCDQYGKNFSQSQDLIVHCKTHSGKTPYEFHEWPMGCKQSSDLPRYQKVSSGDKPYKCKECGKGFRRSSSLHNHHRVHTGEMPYKCDECGKGFGFRSLLCIHQGVHTGKKPYKCEECGKGFDQSSNLLVHQRVHTGEKPYKCSECGKCFSSSSVLQVHWRFHTGEKPYRCGECGKGFSQCTHLHIHQRVHTGEKPYKCNVCGKDFAYSSVLHTHQRVHTGEKPYKCEVCGKCFSYSSYFHLHQRDHIREKPYKCDECGKGFSRNSDLNVHLRVHTRERPYKCKACGKGFSRNSYLLAHQRVHIDETQYTHCERGKDLLTHQRLHEQRETL

SEQ ID NO: 16080 - protein, 521 aa, Homo Sapiens
METDLAEMPEKGALSSQDSPHFQEKSTEEGEVAALRLTARSQETVTFKDVAMDFTPEEWGKLDPAQRDVMLENYRNLVSLWLPVSKPESYNLENGKEPLKLERKAPKSSYSDMETRPQSKDSTSVQDFSKAESCKVAIIDRLTRNSVYDSNLEAALECENWLENQQGNQERHLREMFTHMNSLSEETDHKHDVYWKSFNQKSVLITEDRVPKGSYAFHTLEKSLKQKSNLMKKQRTYKEKKPHKCNDCGELFTYHSVLIRHQRVHTGEKPYTCNECGKSFSHRANLTKHQRTHTRILFECSECKKTFTESSSLATHQRIHVGERPYECNECGKGFNRSTHLVQHQLIHTGVKPYECNECDKAFIHSSALIKHQRTHTGEKPYKCQECGKAFSHCSSLTKHQRVHTGEKPYECSECGKTFSQSTHLVQHQRIHTGEKPYECNECGKTFSRSSNFAKHQRIHIGKKPYKCSECGKAFIHSSALIQHQRTHTGEKPFRCNECGKSFKCSSSLIRHQRVHTEEQP

SEQ ID NO: 16081 - protein, 522 aa, Homo Sapiens
METDLAEMPEKGVLSSQDSPHFQEKSTEEGEVAALRLTARSQAAAAAAAPGSRSLRGVHVPPPLHPAPAREEIKSTCSLKACFSLSLTLTYYRTAFLLSTENEGNLHFQCPSDVETRPQSKDSTSVQDFSKAESCKVAIIDRLTRNSVYDSNLEAALECENWLEKQQGNQERHLREMFTHMNSLSEETDHEHDVYWKSFNQKSVLITEDRVPKGSYAFHTLEKSLKQKSNLMKKQRTYKEKKPHKCNDCGELFTCHSVHIQHQRVHTGEKPYTCNECGKSFSHRANLTKHQRTHTRILFECRECKKTFTESSSLATHQRIHVGERPYECNECGKGFNRSTHLVQHQLIHTGVRPYECNECDKAFIHSSALIKHQRTHTGEKPYKCQECGKAFSHCSSLTKHQRVHTGEKPYECSECGKTFSQSTHLVQHQRIHTGEKPYECSECGKTFSQSSNFAKHQRIHIGKKPYKCSECGKAFIHSSALIQHQRTHTGEKPFRCNECGKSFKCSSSLIRHQRVHTEEQP

SEQ ID NO: 16082 - protein, 754 aa, Homo Sapiens
MNSSSRSQILLRWKSDKAQSGPYNVEKEILTSRFLRDTETCRQNFRNFPYPDLAGPRKALSQLRELCLKWLRPEIHSKEQILELLVLEQFLTILPGEVRTWVKSQYPESSEEAVTLVEDLTQILEEEAPQNSTLSQDTPEEDPRGKHAFQTGWLNDLVTKESMTFKDVAVDITQEDWELMRPVQKELYKTVTLQNYWNMVSLGLTVYRPTVIPILEEPWMVIKEILEGPSPEWETKAQACTPVEDMSKLTKEETHTIKLEDSYDYDDRLERRGKGGFWKIHTDERGFSLKSVLSQEYDPTEECLSKYDIYRNNFEKHSNLIVQFDTQLDNKTSVYNEGRATFNHVSYGIVHRKILPGEKPYKCNVCGKKFRKYPSLLKHQSTHAKEKSYECEECGKEFRHISSLIAHQRMHTGEKPYECHQCGKAFSQRAHLTIHQRIHTGEKPYKCDDCGKDFSQRAHLTIHQRTHTGEKPYKCLECGKTFSHSSSLINHQRVHTGEKPYICNECGKTFSQSTHLLQHQKIHTGKKPYKCNECWKVFSQSTYLIRHQRIHSGEKCYKCNECGKAFAHSSTLIQHQTTHTGEKSYICNICGKAFSQSANLTQHHRTHTGEKPYKCSVCGKAFSQSVHLTQHQRIHNGEKPFKCNICGKAYRQGANLTQHQRIHTGEKPYKCNECGKAFIYSSSLNQHQRTHTGERPYKCNECDKDFSQRTCLIQHQRIHTGEKPYACRICGKTFTQSTNLIQHQRVHTGAKHRN

SEQ ID NO: 16083 - protein, 2723 aa, Homo Sapiens
MADEEAEQERLSCGEGGCVAELQRLGERLQELELQLRESRVPAVEAATDYCQQLCQTLLEYAEKWKTSEDPLPLLEVYTVAIQSYVKARPYLTSECENVALVLERLALSCVELLLCLPVELSDKQWEQFQTLVQVAHEKLMENGSCELHFLATLAQETGVWKNPVLCTILSQEPLDKDKVNEFLAFEGPILLDMRIKHLIKTNQLSQATALAKLCSDHPEIGIKGSFKQTYLVCLCTSSPNGKLIEEISEVDCKDALEMICNLESEGDEKSALVLCTAFLSRQLQQGDMYCAWELTLFWSKLQQRVEPSIQVYLERCRQLSLLTKTVYHIFFLIKVINSETEGAGLATCIELCVKALRLESTENTEVKISICKTISCLLPDDLEVKRACQLSEFLIEPTVDAYYAVEMLYNQPDQKYDEENLPIPNSLRCELLLVLKTQWPFDPEFWDWKTLKRQCLALMGEEASIVSSIDELNDSEVYEKVVDYQEESKETSMNGLSGGVGANSGLLKDIGDEKQKKREIKQLRERGFISARFRNWQAYMQYCVLCDKEFLGHRIVRHAQKHYKDGIYSCPICAKNFNSKETFVPHVTLHVKQSSKERLAAMKPLRRLGRPPKITTTNENQKTNTVAKQEQRPIKKNSLYSTDFIVFNDNDGSDDENDDKDKSYEPEVIPVQKPVPVNEFNCPVTFCKKGFKYFKNLIAHVKGHKDNEDAKRFLEMQSKKVICQYCRRHFVSVTHLNDHLQMHCGSKPYICIQMKCKAGFNSYAELLTHRKEHQVFRAKCMFPKCGRIFSEAYLLYDHEAQHYNTYTCKFTGCGKVYRSQGELEKHLDDHSTPPEKVLPPEAQLNSSGDSIQPSEVNQNTAENIEKERSMLPSENNIENSLLADRSDAWDKSKAESAVTKQDQISASELRQANGPLSNGLENPATTPLLQSSEVAVSIKVSLNQGIEDNFGKQENSTVEGSGEALVTDLHTPVEDTCNDLCHPGFQERKEQDCFNDAHVTQNSLVNSETLKIGDLTPQNLERQVNNLMTFSVQNQAAFQNNLPTSKFECGDNVKTSSNLYNLPLKTLESIAFVPPQSDLSNSLGTPSVPPKAPVQKFSCQVEGCTRTYNSSQSIGKHMKTAHPDQYAAFKMQRKSKKGQKANNLNTPNNGKFVYFLPSPVNSSNPFFTSQTKANGNPACSAQLQHVSPPIFPAHLASVSTPLLSSMESVINPNITSQDKNEQGGMLCSQMENLPSTALPAQMEDLTKTVLPLNIDSGSDPFLPLPAESSSMSLFPSPADSGTNSVFSQLENNTNHYSSQIEGNTNSSFLKGGNGENAVFPSQVNVANNFSSTNAQQSAPEKVKKDRGRGPNGKERKPKHNKRAKWPAIIRDGKFICSRCYRAFTNPRSLGGHLSKRSYCKPLDGAEIAQELLQSNGQPSLLASMILSTNAVNLQQPQQSTFNPEACFKDPSFLQLLAENRSPAFLPNTFPRSGVTNFNTSVSQEGSEIIKQALETAGIPSTFEGAEMLSHVSTGCVSDASQVNATVMPNPTVPPLLHTVCHPNTLLTNQNRTSNSKTSSIEECSSLPVFPTNDLLLKTVENGLCSSSFPNSGGPSQNFTSNSSRVSVISGPQNTRSSHLNKKGNSASKRRKKVAPPLIAPNASQNLVTSDLTTMGLIAKSVEIPTTNLHSNVIPTCEPQSLVENLTQKLNNVNNQLFMTDVKENFKTSLESHTVLAPLTLKTENGDSQMMALNSCTTSINSDLQISEDNVIQNFEKTLEIIKTAMNSQILEVKSGSQGAGETSQNAQINYNIQLPSVNTVQNNKLPDSSPFSSFISVMPTKSNIPQSEVSHKEDQIQEILEGLQKLKLENDLSTPASQCVLINTSVTLTPTPVKSTADITVIQPVSEMINIQFNDKVNKPFVCQNQGCNYSAMTKDALFKHYGKIHQYTPEMILEIKKNQLKFAPFKCVVPTCTKTFTRNSNLRAHCQLVHHFTTEEMVKLKIKRPYGRKSQSENVPASRSTQVKKQLAMTEENKKESQPALELRAETQNTHSNVAVIPEKQLVEKKSPDKTESSLQVITVTSEQCNTNALTNTQTKGRKIRRHKKEKEEKKRKKPVSQSLEFPTRYSPYRPYRCVHQGCFAAFTIQQNLILHYQAVHKSDLPAFSAEVEEESEAGKESEETETKQTLKEFRCQVSDCSRIFQAITGLIQHYMKLHEMTPEEIESMTASVDVGKFPCDQLECKSSFTTYLNYVVHLEADHGIGLRASKTEEDGVYKCDCEGCDRIYATRSNLLRHIFNKHNDKHKAHLIRPRRLTPGQENMSSKANQEKSKSKHRGTKHSRCGKEGIKMPKTKRKKKNNLENKNAKIVQIEENKPYSLKRGKHVYSIKARNDALSECTSRFVTQYPCMIKGCTSVVTSESNIIRHYKCHKLSKAFTSQHRNLLIVFKRCCNSQVKETSEQEGAKNDVKDSDTCVSESNDNSRTTATVSQKEVEKNEKDEMDELTELFITKLINEDSTSVETQANTSSNVSNDFQEDNLCQSERQKASNLKRVNKEKNVSQNKKRKVEKAEPASAAELSSVRKEEETAVAIQTIEEHPASFDWSSFKPMGFEVSFLKFLEESAVKQKKNTDKDHPNTGNKKGSHSNSRKNIDKTAVTSGNHVCPCKESETFVQFANPSQLQCSDNVKIVLDKNLKDCTELVLKQLQEMKPTVSLKKLEVHSNDPDMSVMKDISIGKATGRGQY

SEQ ID NO: 16084 - protein, 475 aa, Homo Sapiens
MSRRKAGSAPRRVEPAPAANPDDEMEMQDLVIELKPEPDAQPQQAPRLGPFSPKEVSSAGRFGGEPHHSPGPMPAGAALLALGPRNPWTLWTPLTPNYPDRQPWTDKHPDLLTCGRCLQTFPLEAITAFMDHKKLGCQLFRGPSRGQGSEREELKALSCLRCGKQFTVAWKLLRHAQWDHGLSIYQTESEAPEAPLLGLAEVAAAVSAVVGPAAEAKSPRASGSGLTRRSPTCPVCKKTLSSFSNLKVHMRSHTGERPYACDQCPYACAQSSKLNRHKKTHRQVPPQSPLMADTSQEQASAAPPEPAVHAAAPTSTLPCSGGEGAGAAATAGVQEPGAPGSGAQAGPGGDTWGAITTEQRTDPANSQKASPKKMPKSGGKSRGPGGSCEFCGKHFTNSSNLTVHRRSHTGERPYTCEFCNYACAQSSKLNRHRRMHGMTPGSTRFECPHCHVPFGLRATLDKHLRQKHPEAAGEA

SEQ ID NO: 16085 - protein, 446 aa, Homo Sapiens
METQADLVSQEPQALLDSALPSKVPAFSDKDSLGDEMLAAALLKAKSQELVTFEDVAVYFIRKEWKRLEPAQRDLYRDVMLENYGNVFSLDRETRTENDQEISEDTRSHGVLLGRFQKDISQGLKFKEAYEREVSLKRPLGNSPGERLNRKMPDFGQVTVEEKLTPRGERSEKYNDFGNSFTVNSNLISHQRLPVGDRPHKCDECSKSFNRTSDLIQHQRIHTGEKPYECNECGKAFSQSSHLIQHQRIHTGEKPYECSDCGKTFSCSSALILHRRIHTGEKPYECNECGKTFSWSSTLTHHQRIHTGEKPYACNECGKAFSRSSTLIHHQRIHTGEKPYECNECGKAFSQSSHLYQHQRIHTGEKPYECMECGGKFTYSSGLIQHQRIHTGENPYECSECGKAFRYSSALVRHQRIHTGEKPLNGIGMSKSSLRVTTELNIREST

SEQ ID NO: 16086 - protein, 623 aa, Homo Sapiens
MAHKYVGLQYHGSVTFEDVAIAFSQQEWESLDSSQRGLYRDVMLENYRNLVSMGHSRSKPHVIALLEQWKEPEVTVRKDGRRWCTDLQLEDDTIGCKEMPTSENCPSFALHQKISRQKPRECQEYGKTLCQDSKPVQHERIHSSEKPNRCKECGKNFSNGHQLTIHQRLHVGEKPYKYEKCGKAFISGSAFVKHGRIHTGEKPLKCKQCGKTISGSYQLTVHKSIHTGKKPYECGECGKAFLVYGKLTRHQSTHTGEKPFGCEECGKAFSTFSYLVQHQRIHTSEKPYECKECGKAFSTSSPLAKHQRIHTGEKPYECKECGKSFTVYGQLTRHQSIHTGEKPFECKECGKAFRLSSFLHAHQRIHAEIKPYGCKECGRTFSRASYLVQHGRLHTGEKPYECKECGKAFSTGSYLVQHQRIHTGEKPYECKECGKAFISRHQLTVHQRVHTGEKPYECKECGKAFRVHVHLTQHRKIHTDVKPYECKECGKTFSRASYLVQHSRIHTGKKPYECKECGKAFSSGSYLVQHQRIHTGEKPYECNKCGKAFTVYGQLIGHQSVHTGEKPFECKECGKAFRLNSFLTEHQRVHTGEKPFKCKKCGKTFRYSSALKVHLRKHMSVIP

SEQ ID NO: 16087 - protein, 604 aa, Homo Sapiens
MMKSQGLVSFKDVAVDFTQEEWQQLDPSQRTLYRDVMLENYSHLVSMGYPVSKPDVISKLEQGEEPWIIKGDISNWIYPDEYQADGRQDRKSNLHNSQSCILGTVSFHHKILKGVTRDGSLCSILKVCQGDGQLQRFLENQDKLFRQVTFVNSKTVTEASGHKYNPLGKIFQECIETDISIQRFHKYDAFKKNLKPNIDLPSCYKSNSRKKPDQSFGGGKSSSQSEPNSNLEKIHNGVIPFDDNQCGNVFRNTQSLIQYQNVETKEKSCVCVTCGKAFAKKSQLIVHQRIHTGKKPYDCGACGKAFSEKFHLVVHQRTHTGEKPYDCSECGKAFSQKSSLIIHQRVHTGEKPYECSECGKAFSQKSPLIIHQRIHTGEKPYECRECGKAFSQKSQLIIHHRAHTGEKPYECTECGKAFCEKSHLIIHKRIHTGEKPYKCAQCEEAFSRKTELITHQLVHTGEKPYECTECGKTFSRKSQLIIHQRTHTGEKPYKCSECGKAFCQKSHLIGHQRIHTGEKPYICTECGKAFSQKSHLPGHQRIHTGEKPYICAECGKAFSQKSDLVLHQRIHTGERPYQCAICGKAFIQKSQLTVHQRIHTVVKS

SEQ ID NO: 16088 - protein, 478 aa, Homo Sapiens
MSQVTFSDVAIDFSHEEWACLDSAQRDLYKDVMVQNYENLVSVGLSVTKPYVIMLLEDGKEPWMMEKKLSKAYPFPLSHSVPASVNFGFSALFEHCSEVTEIFELSELCVFWVLHFLSNSPNSTVEAFSRSKKKKKKKKKRQCFAFLIYFRLGIKMGKQGIINKEGYLYEDSPQPVTMEKVVKQSYEFSNSNKNLEYTECDTFRSTFHSKSTLSEPQNNSAEGNSHKYDILKKNLSKKSVIKSERINGGKKLLNSNKSGAAFNQSKSLTLPQTCNREKIYTCSECGKAFGKQSILSRHWRIHTGEKPYECRECGKTFSHGSSLTRHQISHSGEKPYKCIECGKAFSHGSSLTNHQSTHTGEKPYECMNCGKSFSRVSLLIQHLRIHTQEKRYECRICGKAFIHSSSLIHHQKSHTGEKPYECRECGKAFCCSSHLTQHQRIHSMKKKYECNKCLKVFSSFSFLVQHQSIHTEEKPFEV

SEQ ID NO: 16089 - protein, 659 aa, Homo Sapiens
MAAAVLMDRVQSCVTFEDVFVYFSREEWELLEEAQRFLYRDVMLENFALVATLGFWCEAEHEAPSEQSVSVEGVSQVRTAESGLFQKAHPCEMCDPLLKDILHLAEHQGSHLTQKLCTRGLCRRRFSFSANFYQHQKQHNGENCFRGDDGGASFVKSCTVHMLGRSFTCREEGMDLPDSSGLFQHQTTYNRVSPCRRTECMESFPHSSSLRQHQGDYDGQMLFSCGDEGKAFLDTFTLLDSQMTHAEVRPFRCLPCGNVFKEKSALINHRKIHSGEISHVCKECGKAFIHLHHLKMHQKFHTGKRHYTCSECGKAFSRKDTLVQHQRVHTGERSYDCSECGKAYSRSSHLVQHQRIHTGERPYKCNKCGKAFSRKDTLVQHQRFHTGERPYECSECGKFFSQSSHLIEHWRIHTGARPYECIECGKFFSHNSSLIKHRRVHTGARSYVCSKCGKAFGCKDTLVQHQIIHTGARPYECSECGKAFSRKDTLVQHQKIHTGERPYECGECGKFFSHSSNLIVHQRIHTGAKPYECNECGKCFSHNSSLILHQRVHTGARPYVCSECGKAYISSSHLVQHKKVHTGARPYECSECGKFFSRNSGLILHQRVHTGEKPYVCSECGKAYSRSSHLVRHQKAHTGERAHECNSFGGPLAASLKLV

SEQ ID NO: 16090 - protein, 666 aa, Homo Sapiens
MQEVVLLDESSGPPSQLLWTRQDTQLPQESALLPAPYPAFTKDGSQGNLPQADITLMSQAQESVTFEDVAVNFTNREWQCLTYAQRHLYKDVMLENYGNMVSLGFPFPKPPLISHLEREVDPCVQDPQDRESLSCSYPVSADKMWPENEKASSQQEIFENGEAYWMKFNSLLKVDSRDPKVREVCVQDVKLENQWETSIREKLREEKEGSEEVTCKKGKNQKVLSKNLNPNSKHSQCNKVLIAQKLHECARCGKNFSWHSDLILHEQIHSGEKPHVCNECGKAFKTRNQLSMHRIIHTGEKPFNCTQCGKAFNSRSALCRHKKTHSGEKPHECRDCGKAFKTRNRLCMHQLIHTGEKPYKCNCCGKAFQFKHSLTIHGRIHTGEKPYECEECGKAFSGSSDLTKHIRIHTGERPYECSKCGRAFSRSSDLSKHKRIHTREKHYGCPQCGKDFSIKAELTKHRRIHTEEKRYRCEECGKAFRHNCKRRAHEREHTGEKPYQCRDCGKTFQDKHCLTIHQRIHTGEKPYKCLECGKAFSGKSNLTNHRRIHTGEKPHKCEVCGMAFHHSSVLRQHKRIHTGEKPYTCSECGTSFRQGSALIGHKRVHTGEKPYECEECGKAFRVSSNLTGHKKRKHQVWSTHELDGSRKSLSPVTVSQTSVVSILTSA

SEQ ID NO: 16091 - protein, 1004 aa, Homo Sapiens
MAALHTTPDSPAAQLERAEDGSECDPDQEEEEEEEEKGEEVQEVEEEEEEIVVEEEEEGVAEVVQDAQVEAVAEVEVEADVEEEDVKEVLAEEECPALGTQERLSRGGDAKSPVLQEKGLQASRAPATPRDEDLEEEEEEEEDEDEDDLLTAGCQELVTFEDVAVYFSLEEWERLEADQRGLYQEVMQENYGILVSLGYPIPKPDLIFRLEQGEEPWVPDSPRPEEGDIVTGVYTGAWFWTDDIEDHEEEDDEDFLAEVAEEENEPPGLWSAAYGVGDVPGTWGPDDSDSAQTPEGWGPDPGGLGVLADGSEAKPFLPGREPGANLLSPWAFPAAVAPPAGRPETTCDVCGKVFPHRSRLAKHQRYHAAVKPFGCEECGKGFVYRSHLAIHQRTHTGEKPFPCPDCGKRFVYKSHLVTHRRIHTGERPYRCAFCGAGFGRRSYLVTHQRTHTGERPYPCSHCGRSFSQSSALARHQAVHTADRPHCCPDCGQAFRLRADFQRHRRGGGCAEAGGDGPRREPGETAAAAGPEDTDPGPEGSEVGEADGEAEAAAEEREEAAVAAPTPSGKVDPAPERRFLELGNGLGEGEGPSSHPLGFHFPVHPKSWLHPDSFPILGLPDFRERLPVDGRPLPAPLGGPLSLVEGTGLACDPFGGGGAAGGGGGLRAFGPAIGGLLAEPAPAALAEEESPWICSDCGKTFGRRAALAKHQRYHAGERPHRCADCGKSFVYGSHLARHRRTHTGERPFPCPECGARFARGSHLAAHVRGHTGEKPFVCGVCGAGFSRRAHLTAHGRAHTGERPYACGECGRRFGQSAALTRHQWAHAEEKPHRCPDCGKGFGHSSDFKRHRRTHTGEKPFRCADCGRGFAQRSNLAKHRRGHTGERPFPCPECGKRFSQRSVLVTHQRTHTGERPYACANCGRRFSQSSHLLTHMKTHRGATAAPGSGSAPAPAPKPEAAAKGPSSAGPGERGSALLEFAGGTSFGSEHQAAFAGPSGAYREGVL

SEQ ID NO: 16092 - protein, 595 aa, Homo Sapiens
MAALSPTFATSTQDSTCLQDSEFPVSSKDHSCPQNLDLFVCSGLEPHTPSVGSQESVTFQDVAVDFTEKEWPLLDSSQRKLYKDVMLENYSNLTSLGYQVGKPSLISHLEQEEEPRTEERGAHQGACADWETPSKTKWSLLMEDIFGKETPSGVTMERAGLGEKSTEYAHLFEVFGMDPHLTQPMGRHAGKRPYHRRDYGVAFKGRPHLTQHMSMYDGRKMHECHQCQKAFTTSASLTRHRRIHTGEKPYECSDCGKAFNDPSALRSHARTHLKEKPFDCSQCGNAFRTLSALKIHMRVHTGERPYKCDQCGKAYGRSCHLIAHKRTHTGERPYECHDCGKAFQHPSHLKEHVRNHTGEKPYACTQCGKAFRWKSNFNLHKKNHMVEKTYECKECGKSFGDLVSRRKHMRIHIVKKPVECRQCGKTFRNQSILKTHMNSHTGEKPYGCDLCGKAFSASSNLTAHRKIHTQERRYECAACGKVFGDYLSRRRHMSVHLVKKRVECRQCGKAFRNQSTLKTHMRSHTGEKPYECDHCGKAFSIGSNLNVHRRIHTGEKPYECLVCGKAFSDHSSLRSHVKTHRGEKLFVSSVWKRLQ

SEQ ID NO: 16093 - protein, 2279 aa, Homo Sapiens
MYRSSARSSVSSHRPKDDGGGGPRSGRSSGSSSGPARRSSPPPPPSGSSSRTPARRPRSPSGHRGRRASPSPPRGRRVSPSPPRARRGSPSPPRGRRLFPPGPAGFRGSSRGESRADYARDGRGDHPGDSGSRRRSPGLCSDSLEKSLRITVGNDHFCVSTPERRRLSDRLGSPVDNLEDMDRDDLTDDSVFTRSSQCSRGLERYISQEEGPLSPFLGQLDEDYRTKETFLHRSDYSPHISCHDELLRGTERNREKLKGYSIRSEERSREAKRPRYDDTVKINSMGGDHPSFTSGTRNYRQRRRSPSPRFLDPEFRELDLARRKREEEEERSRSLSQELVGVDGGGTGCSIPGLSGVLTASEPGYSLHRPEEVSVMPKKSILKKRIEVDIMEPSMQLESFSSSTSSSQDHPLYSGHPSLPLSGAIAAFASEIENKGTMVETALKEPQGNLYQWGPLPGIPKDNSPLREKFGSFLCHKDNLDLKAEGPERHTDFLLPHERASQDGSGFSRILSMLADSTSTQEKRRRSFPDIEDEEKFLYGDEEEDLKAESVPKPLGSSESEVMRQKASSLPSSAPAVKLESLEETNPEYAKIHDLLKTIGLDIGVAEISQLAARTQERLHGKKPSLRSSADRRSSVDRYFSADHCSSVDHRFSADRCSSVDHCFSADRRSSDPHRLESREAHHSNTHSPEVSHPHPPSPVDPYLLTKNSPPFLKSDHPVGHISGPEVVGSGFQSSVAVRCMLPSAPSAPIRLPHTAALSQFHMPRASQFAAARIPPNYQGPAIPPASFDAYRHYMAYAASRWPMYPTSQPSNHPVPEPHRIMPITKQATRSRPNLRVIPTVTPDKPKQKESLRGSIPAAQVPVQVSIPSLIRYNPEKISDEKNRASQKQKVIEEREKLKNDREARQKKMYYLRTELERLHKQQGEMLRKKRREKDGHKDPLLVEVSRLQDNIMKDIAELRQEAEEAEKKQSELDKVAQILGINIFDKSQKSLSDSREPTEKPGKAEKSKSPEKVSSFSNSSSNKESKVNNEKFRTKSPKPAESPQSATKQLDQPTAAYEYYDAGNHWCKDCNTICGTMFDFFTHMHNKKHTQTLDPYNRPWASKTQSEAKQDAIKRTDKITVPAKGSEFLVPISGFYCQLCEEFLGDPISGEQHVKGHQHNEKYKKYVDENPLYEERRNLDRQAGLAVVLETERRRQSELKRKLSEKPKEEKKEKKAKAVKEVKEDDKVSEKLEDQLSEGRNSPEKAENKRNTGIKLQLKEEVKKESPTSSSFGKFSWKKPEKEEEKSSLVTPSISKEEILESSKDKEDGKTEAGKAKPIKIKLSGKTVVAHTSPWMPVVTTSTQTKIRPNLPIPSTVLRKSCSATMSKPAPLNTFLSIKSSGTTAKPLPVVKESSADLLLPPDIISKAFGGEEVILKGSPEEKVVLAEKSEPSHLPEQILPPPPPPPPPPPPPPPVIPHPAAPSAAQANAILAPVKSNPVVSQTLSPGFVGPNILNPVLPVAIMASAQPAAIPSDETAPGVSESDRDQTLFSVLVRPPPPLSSVFSEQAKKLEKRNSCLATANAKDLYDIFYSSGGKGAPETKGAPETKLSGGPLANGENSNLSRTKSSDTSSTSPLNSSASQEELHQDEGLVAAPIVSNSEKPIAKTLVALGKWSVVEHVGPKSTGSTYGFLQPLTRLCQSRPYETITPKTDTLAIWTSSSFQSDTSRDISPEKSELDLGEPGPPGVEPPPQLLDIQCKESQKLVEIHLRESVNQDKESQELRKSEDCRESEIETNTELKERVKELSEGIVDEGVSTSIGPHSIDDSNLNHGNRYMWEGEVKQPNLLMIDKEAEQSNKLMTGSETPSKVVIKLSPQACSFTKAKLDSFLSEARSLLNPQDTPVKISAPELLLHSPARSAMCLTGSPQEQGVSVVSEEGLENSAPESASRTSRYRSLKLKRERSKDFQVKKIYELAVWDENKKRPETWESPEKPKTEALELQDVHPELTVTIESKALEDFEATDLKVEELTALGNLGDMPVDFCTTRVSPAHRSPTVLCQKVCEENSVSPIGCNSSDPADFEPIPSFSGFPLDSPKTLVLDFETEGERNSPNPRSVRIPSPNILKTGLTENVDRGLGGLEGTHQALDLLAGGMMPEEVKESSQLDKQESLGLELKTINSAGLGPSPCLPDLVDFVTRTSGVQKDKLCSPLSEPGDPSKCSSLELGPLQLEISNASTTEVAILQVDDDSGDPLNLVKAPVSRSPPREQVIEDNMVPQGMPEQETTVGAIQDHTESSVHN

SEQ ID NO: 16094 - protein, 582 aa, Homo Sapiens
MSESWQQPPQTQPQQPQPPQPQHHAEPPPALAEHTLPPGTAENPLGCAVYGILLQPDPGLQPPQHAPLQAAGEPGPKCGVCGHDLAHLSSPHEHQCLAGHDRSFQCTQCLKIFHQATDLLEHQCVQAEQKPFVCGVCKMGFSLLTSLAQHHSSHSGLVKCSICEKTYKPAEAAEPATTAAPSLPAAPAPSTVTPAEQADKPYSCPICQKPFKHLSELSRHERIHTGEKPYKCTLCDKSFSQSSHLVHHKRTHSSERPYKCAVCEKTFKHRSHLVRHMYAHSGEHHLFRCNVCELHFKESSELLQHPCTPSGERPFRCGECQKAFKRPSDLRQHERTHSAERPFKCDLCPMGFKQQYALMRHRRTHKTEEPFKCGLCEKGFGQPSHLLYHQHVHTLETLFKCPVCQKGFDQSAELLRHKCLPGAAERPFKCPVCNKAYKRASALQKHQLAHCAAAEKPLRCTLCERRFFSSSEFVQHRCDPAREKPLKCPDCEKRFKYASDLQRHRRVHTGEKPYKCPNCDKAFKQREHLNKHQGVHAREQQFKCVWCGERFLDVALLQEHSAQHSAAAAAAEGAYQVAACLP

SEQ ID NO: 16095 - protein, 273 aa, Homo Sapiens
MFGFPTATLLDCHGRYAQNVAFFNVMTEAHHKYDHSEATGSSSWDIQNSFRREKLEQKSPDSKTLQEDSPGVRQRVYECQECGKSFRQKGSLTLHERIHTGQKPFECTHCGKSFRAKGNLVTHQRIHTGEKPYQCKECGKSFSQRGSLAVHERLHTGQKPYECAICQRSFRNQSNLAVHRRVHSGEKPYRCDQCGKAFSQKGSLIVHIRVHTGLKPYACTQCRKSFHTRGNCILHGKIHTGETPYLCGQCGKSFTQRGSLAVHQRSCSQRLTL

SEQ ID NO: 16096 - protein, 509 aa, Homo Sapiens
MALSQGLLTFRDVAIEFSQEEWKCLDPAQRTLYRDVMLENYRNLVSLDISSKCMMNTLSSTGQGNTEVIHTGTLQRQASYHIGAFCSQEIEKDIHDFVFQWQEDETNDHEAPMTEIKKLTSSTDRYDQRHAGNKPIKGQLESRFHLHLRRHRRIHTGEKPYKCEECEKVFSCKSHLEIHRIIHTGEKPYKCKVCDKAFKHDSHLAKHTRIHRGDKHYTCNECGKVFDQKATLACHHRSHTGEKPYKCNECGKTFSQTSHLVYHHRLHTGEKPYKCNECGKTFARNSVLVIHKAVHTAEKPYKCNECGKVFKQRATLAGHRRVHTGEKPYRCEECDKVFSRKSHLERHRRIHTGEKPYKCKVCDKAFRSDSRLAEHQRVHTGERPYTCNECGKVFSTKAYLACHQKLHTGEKLYECEECDKVYIRKSHLERHRRIHTGEKPHKCGDCGKAFNSPSHLIRHQRIHTGQKSYKCHQCGKVFSLRSLLAEHQKIPFGDNCFKCNEYSKPSSIN

SEQ ID NO: 16097 - protein, 402 aa, Homo Sapiens
MYTSEEKCNQRTQKRKIYNVCPRKGKKIFIHMHEIIQIDGHIYQCLECKQNFCENLALIMCERTHTGEKPYKCDMCEKTFVQSSDLTSHQRIHNYEKPYKCSKCEKSFWHHLALSGHQRTHAGKKFYTCDICGKNFGQSSDLLVHQRSHTGEKPYLCSECDKCFSRSTNLIRHRRTHTGEKPFKCLECEKAFSGKSDLISHQRTHTGERPYKCNKCEKSYRHRSAFIVHKRVHTGEKPYKCGACEKCFGQKSDLIVHQRVHTGEKPYKCLECMRSFTRSANLIRHQATHTHTFKCLEYEKSFNCSSDLIVHQRIHMEEKPHQWSACESGFLLGMDFVAQQKMRTQTEELHYKYTVCDKSFHQSSALLQHQTVHIGEKPFVCNVSEKGLELSPPHASEASQMS

SEQ ID NO: 16098 - protein, 553 aa, Homo Sapiens
MAFEDVAVYFSQEEWGLLDTAQRALYRRVMLDNFALVASLGLSTSRPRVVIQLERGEEPWVPSGTDTTLSRTTYRRRNPGSWSLTEDRDVSGEWPRAFPDTPPGMTTSVFPVAGACHSVKSLQRQRGASPSRERKPTGVSVIYWERLLLGSGSGQASVSLRLTSPLRPPEGVRLREKTLTEHALLGRQPRTPERQKPCAQEVPGRTFGSAQDLEAAGGRGHHRMGAVWQEPHRLLGGQEPSTWDELGEALHAGEKSFECRACSKVFVKSSDLLKHLRTHTGERPYECAQCGKAFSQTSHLTQHQRIHSGETPYACPVCGKAFRHSSSLVRHQRIHTAEKSFRCSECGKAFSHGSNLSQHRKIHAGGRPYACAQCGRRFCRNSHLIQHERTHTGEKPFVCALCGAAFSQGSSLFKHQRVHTGEKPFACPQCGRAFSHSSNLTQHQLLHTGERPFRCVDCGKAFAKGAVLLSHRRIHTGEKPFVCTQCGRAFRERPALFHHQRIHTGEKTVRRSRASLHPQARSVAGASSEGAPAKETEPTPASGPAAVSQPAEV

SEQ ID NO: 16099 - protein, 544 aa, Homo Sapiens
MTFEDVAVYFSQEEWGLLDTAQRALYRHVMLENFTLVTSLGLSTSRPRVVIQLERGEEPWVPSGKDMTLARNTYGRLNSGSWSLTEDRDVSGEWPRAFPDTPPGMTTSVFPVADACHSVKSLQRQPGASPSQERKPTGVSVIYWERLLLGSRSDQASISLRLTSPLRPPKSSRPREKTFTEYRVPGRQPRTPERQKPCAQEVPGRAFGNASDLKAASGGRDRRMGAAWQEPHRLLGGQEPSTWDELGEALHAGEKSFECRACSKVFVKSSDLLKHLRTHTGERPYECTQCGKAFSQTSHLTQHQRIHSGETPYACPVCGKAFRHSSSLVRHQRIHTAEKSFRCSECGKAFSHGSNLSQHRKIHAGGRPYACAQCGRRFCRNSHLIQHERTHTGEKPFVCALCGAAFSQGSSLFLHQRVHTGEKPFACAQCGRSFSRSSNLTQHQLLHTGERPFRCVDCGKGFAKGAVLLSHRRIHTGEKPFVCTQCGRAFRERPALLHHQRIHTTEKTNAAAPDCTPGPGFLQGHHRKVRRGGKPSPVLKPAKV

SEQ ID NO: 16100 - protein, 582 aa, Homo Sapiens
MDFEDDYTHSACRNTYQGFNGMDRDYGPGSYGGMDRDYGHGSYGGQRSMDSYLNQSYGMDNHSGGGGGSRFGPYESYDSRSSLGGRDLYRSGYGFNEPEQSRFGGSYGGRFESSYRNSLDSFGGRNQGGSSWEAPYSRSKLRPGFMEDRGRENYSSYSSFSSPHMKPAPVGSRGRGTPAYPESTFGSRNYDAFGGPSTGRGRGRGHMGDFGSIHRPGIVVDYQNKSTNVTVAAARGIKRKMMQPFNKPSGTFIKKPKLAKPMEKISLSKSPTKTDPKNEEEEKRRIEARREKQRRRREKNSEKYGDGYRMAFTCSFCKFRTFEEKDIELHLESSSHQETLDHIQKQTKFDKVVMEFLHECMVNKFKKTSIRKQQTNNQTEVVKIIEKDVMEGVTVDDHMMKVETVHCSACSVYIPALHSSVQQHLKSPDHIKGKQAYKEQIKRESVLTATSILNNPIVKARYERFVKGENPFEIQDHSQDQQIEGDEEDEEKIDEPIEEEEDEDEEEEAEEVGEVEEVEEVEEVREGGIEGEGNIQGVGEGGEVGVVGEVEGVGEVEEVEELEEETAKEEPADFPVEQPEEN

SEQ ID NO: 16101 - protein, 541 aa, Homo Sapiens
MRLKMTTRNFPEREVPCDVEVERFTREVPCLSSLGDGWDCENQEGHLRQSALTLEKPGTQEAICEYPGFGEHLIASSDLPPSQRVLATNGFHAPDSNVSGLDCDPALPSYPKSYADKRTGDSDACGKGFNHSMEVIHGRNPVREKPYKYPESVKSFNHFTSLGHQKIMKRGKKSYEGKNFENIFTLSSSLNENQRNLPGEKQYRCTECGKCFKRNSSLVLHHRTHTGEKPYTCNECGKSFSKNYNLIVHQRIHTGEKPYECSKCGKAFSDGSALTQHQRIHTGEKPYECLECGKTFNRNSSLILHQRTHTGEKPYRCNECGKPFTDISHLTVHLRIHTGEKPYECSKCGKAFRDGSYLTQHERTHTGEKPFECAECGKSFNRNSHLIVHQKIHSGEKPYECKECGKTFIESAYLIRHQRIHTGEKPYGCNQCQKLFRNIAGLIRHQRTHTGEKPYECNQCGKAFRDSSCLTKHQRIHTKETPYQCPECGKSFKQNSHLAVHQRLHSREGPSRCPQCGKMFQKSSSLVRHQRAHLGEQPMET

SEQ ID NO: 16102 - protein, 463 aa, Homo Sapiens
MAQGLVTFADVAIDFSQEEWACLNSAQRDLYWDVMLENYSNLVSLDLESAYENKSLPTEKNIHEIRASKRNSDRRSKSLGRNWICEGTLERPQRSRGRYVNQMIINYVKRPATREGTPPRTHQRHHKENSFECKDCGKAFSRGYQLSQHQKIHTGEKPYECKECKKAFRWGNQLTQHQKIHTGEKPYECKDCGKAFRWGSSLVIHKRIHTGEKPYECKDCGKAFRRGDELTQHQRFHTGEKDYECKDCGKTFSRVYKLIQHKRIHSGEKPYECKDCGKAFICGSSLIQHKRIHTGEKPYECQECGKAFTRVNYLTQHQKIHTGEKPHECKECGKAFRWGSSLVKHERIHTGEKPYKCTECGKAFNCGYHLTQHERIHTGETPYKCKECGKAFIYGSSLVKHERIHTGVKPYGCTECGKSFSHGHQLTQHQKTHSGAKSYECKECGKACNHLNHLREHQRIHNS

SEQ ID NO: 16103 - protein, 665 aa, Homo Sapiens
MESVTFEDVAVEFIQEWALLDSARRSLCKYRMLDQCRTLASRGTPPCKPSCVSQLGQRAEPKATERGILRATGVAWESQLKPEELPSMQDLLEEASSRDMQMGPGLFLRMQLVPSIEERETPLTREDRPALQEPPWSLGCTGLKAAMQIQRVVIPVPTLGHRNPWVARDSAVPARDPAWLQEDKVEEEAMAPGLPTACSQEPVTFADVAVVFTPEEWVFLDSTQRSLYRDVMLENYRNLASVADQLCKPNALSYLEERGEQWTTDRGVLSDTCAEPQCQPQEAIPSQDTFTEILSIDVKGEQPQPGEKLYKYNELEKPFNSIEPLFQYQRIHAGEASCECQEIRNSFFQSAHLIVPEKIRSGDKSYACNKCEKSFRYSSDLIRHEKTHTAEKCFDCQECGQAFKYSSNLRRHMRTHTGEKPFECSQCGKTFTRNFNLILHQRNHTGEKPYECKDCGKAFNQPSSLRSHVRTHTGEKPFECSQCGKAFREHSSLKTHLRTHTREKPYECNQCGKPFRTSTHLNVHKRIHTGEKLYECATCGQVLSRLSTLKSHMRTHTGEKPYVCQECGRAFSEPSSLRKHARTHSGKKPYACQECGRAFGQSSHLIVHVRTHSAGRPYQCNQCEKAFRHSSSLTVHKRTHVGRETIRNGSLPLSMSHPYCGPLAN

SEQ ID NO: 16104 - protein, 680 aa, Homo Sapiens
MKMKKFQIPVSFQDLTVNFTQEEWQQLDPAQRLLYRDVMLENYSNLVSVGYHVSKPDVIFKLEQGEEPWIVEEFSNQNYPDIDDALEKNKEIQDKHLTQTVFFSNKTLITERENVFGKTLNLGMNSVPSRKMPYKCNPGGNSLKTNSEVIVAKKSKENRKIPDGYSGFGKHEKSHLGMKKYRYNPMRKASNQNENLILHQNIQILKQPFDYNKCGKTFFKRAILITQKGRQTERKPNECNECRKTFSKRSTLIVHQRIHTGEKPYVCSDCRKTFRVKTSLTRHRRIHTGERPYECSECRKTFIDKSALIVHQKIHGGEKSYECNECGKTFFRKSALAEHFRSHTGEKPYECKECGNAFSKKSYLVVHQRTHRGEKPNECKECGKTFFCQSALTAHQRIHTGEKPYECSECEKTFFCQSALNVHRRSHTGEKPYECSQCGKFLCTKSALIAHQITHRGKKSYECNECGKFFCHKSTLTIHQRTHTGEKHGVFNKCGRISIVKSNCSQCKRMNTKENLYECSEHGHAVSKNSHLIVHQRTIWERPYECNECGRTYCRKSALTHHQRTHTGQRPYECNECGKTFCQKFSFVEHQRTHTGEKPYECNECGKSFCHKSAFRVHRRIHTGEKPYECNQCGKTYRRLWTLTEHQKIHTGEKPYECNKCEKTFRHKSNFLLHQKSHKE

SEQ ID NO: 16105 - protein, 1342 aa, Homo Sapiens
MEENEVESSSDAAPGPGRPEEPSESGLGVGTSEAVSADSSDAAAAPGQAEADDSGVGQSSDRGSRSQEEVSESSSSADPLPNSYLPDSSSVSHGPVAGVTGGPPALVHSSALPDPNMLVSDCTASSSDLGSAIDKIIESTIGPDLIQNCITVTSAEDGGAETTRYLILQGPDDGAPMTSPMSSSTLAHSLAAIEALADGPTSTSTCLEAQGGPSSPVQLPPASGAEEPDLQSLEAMMEVVVVQQFKCKMCQYRSSTKATLLRHMRERHFRPVAAAAAAAGKKGRLRKWSTSTKSQEEEGPEEEDDDDIVDAGAIDDLEEDSDYNPAEDEPRGRQLRLQRPTPSTPRPRRRPGRPRKLPRLEISDLPDGVEGEPLVSSQSGQSPPEPQDPEAPSSSGPGHLVAMGKVSRTPVEAGVSQSDAENAAPSCPDEHDTLPRRRGRPSRRFLGKKYRKYYYKSPKPLLRPFLCRICGSRFLSHEDLRFHVNSHEAGDPQLFKCLQCSYRSRRWSSLKEHMFNHVGSKPYKCDECSYTSVYRKDVIRHAAVHSRDRKKRPDPTPKLSSFPCPVCGRVYPMQKRLTQHMKTHSTEKPHMCDKCGKSFKKRYTFKMHLLTHIQAVANRRFKCEFCEFVCEDKKALLNHQLSHVSDKPFKCSFCPYRTFREDFLLSHVAVKHTGAKPFACEYCHFSTRHKKNLRLHVRCRHASSFEEWGRRHPEEPPSRRRPFFSLQQIEELKQQHSAAPGPPPSSPGPPEIPPEATTFQSSEAPSLLCSDTLGGATIIYQQGAEESTAMATQTALDLLLNMSAQRELGGTALQVAVVKSEDVEAGLASPGGQPSPEGATPQVVTLHVAEPGGGAAAESQLGPPDLPQITLAPGPFGGTGYSVITAPPMEEGTSAPGTPYSEEPAGEAAQAVVVSDTLKEAGTHYIMATDGTQLHHIELTADGSISFPSPDALASGAKWPLLQCGGLPRDGPEPPSPAKTHCVGDSQSSASSPPATSKALGLAVPPSPPSAATAASKKFSCKICAEAFPGRAEMESHKRAHAGPGAFKCPDCPFSARQWPEVRAHMAQHSSLRPHQCSQCSFASKNKKDLRRHMLTHTKEKPFACHLCGQRFNRNGHLKFHIQRLHSPDGRKSGTPTARAPTQTPTQTIILNSDDETLATLHTALQSSHGVLGPERLQQALSQEHIIVAQEQTVTNQEEAAYIQEITTADGQTVQHLVTSDNQVQYIISQDGVQHLLPQEYVVVPEGHHIQVQEGQITHIQYEQGAPFLQESQIQYVPVSPGQQLVTQAQLEAAAHSAVTAVADAAMAQAQGLFGTDETVPEHIQQLQHQGIEYDVITLADD

SEQ ID NO: 16106 - protein, 751 aa, Homo Sapiens
MGPQGARRQAFLAFGDVTVDFTQKEWRLLSPAQRALYREVTLENYSHLVSLGILHSKPELIRRLEQGEVPWGEERRRRPGPCAGIYAEHVLRPKNLGLAHQRQQQLQFSDQSFQSDTAEGQEKEKSTKPMAFSSPPLRHAVSSRRRNSVVEIESSQGQRENPTEIDKVLKGIENSRWGAFKCAERGQDFSRKMMVIIHKKAHSRQKLFTCRECHQGFRDESALLLHQNTHTGEKSYVCSVCGRGFSLKANLLRHQRTHSGEKPFLCKVCGRGYTSKSYLTVHERTHTGEKPYECQECGRRFNDKSSYNKHLKAHSGEKPFVCKECGRGYTNKSYFVVHKRIHSGEKPYRCQECGRGFSNKSHLITHQRTHSGEKPFACRQCKQSFSVKGSLLRHQRTHSGEKPFVCKDCERSFSQKSTLVYHQRTHSGEKPFVCRECGQGFIQKSTLVKHQITHSEEKPFVCKDCGRGFIQKSTFTLHQRTHSEEKPYGCRECGRRFRDKSSYNKHLRAHLGEKRFFCRDCGRGFTLKPNLTIHQRTHSGEKPFMCKQCEKSFSLKANLLRHQWTHSGERPFNCKDCGRGFILKSTLLFHQKTHSGEKPFICSECGQGFIWKSNLVKHQLAHSGKQPFVCKECGRGFNWKGNLLTHQRTHSGEKPFVCNVCGQGFSWKRSLTRHHWRIHSKEKPFVCQECKRGYTSKSDLTVHERIHTGERPYECQECGRKFSNKSYYSKHLKRHLREKRFCTGSVGEASS

SEQ ID NO: 16107 - protein, 810 aa, Homo Sapiens
MNKVEQKSQESVSFKDVTVGFTQEEWQHLDPSQRALYRDVMLENYSNLVSVGYCVHKPEVIFRLQQGEEPWKQEEEFPSQSFPVWTADHLKERSQENQSKHLWEVVFINNEMLTKEQGDVIGIPFNVDVSSFPSRKMFCQCDSCGMSFNTVSELVISKINYLGKKSDEFNACGKLLLNIKHDETHTQEKNEVLKNRNTLSHHEETLQHEKIQTLEHNFEYSICQETLLEKAVFNTQKRENAEENNCDYNEFGRTLCDSSSLLFHQISPSRDNHYEFSDCEKFLCVKSTLSKPHGVSMKHYDCGESGNNFRRKLCLSHLQKGDKGEKHFECNECGKAFWEKSHLTRHQRVHTGQKPFQCNECEKAFWDKSNLTKHQRSHTGEKPFECNECGKAFSHKSALTLHQRTHTGEKPYQCNACGKTFCQKSDLTKHQRTHTGLKPYECYECGKSFRVTSHLKVHQRTHTGEKPFECLECGKSFSEKSNLTQHQRIHIGDKSYECNACGKTFYHKSLLTRHQIIHTGWKPYECYECGKTFCLKSDLTVHQRTHTGQKPFACPECGKFFSHKSTLSQHYRTHTGEKPYECHECGKIFYNKSYLTKHNRTHTGEKPYECNECGKAFYQKSQLTQHQRIHIGEKPYKCNECGKAFCHKSALIVHQRTHTQEKPYKCNECGKSFCVKSGLIFHERKHTGEKPYECNECGKFFRHKSSLTVHHRAHTGEKSCQCNECGKIFYRKSELAQHQRSHTGEKPYECNTCRKTFSQKSNLIVHQRRHIGENLMNEMDIRNFQPQVSLHNASEYSHCGESPDDILNVQ

SEQ ID NO: 16108 - protein, 778 aa, Homo Sapiens
MNKVDQKFQGSVSFKDVTVGFTQEEWQHLDPSQRALYRDVMLENYSNLVSVGYCAHKPEVIFRLEQGEEPWRLEEEFPSQSFPEVWTADHLKERSQENQSKHLWEVVFINNEMLTKEQGNVIGIPFNMDVSSFPSRKMFCQYDSRGMSFNTVSELVISKINYLGKKSDEFNACGKLLLNIKHDETHTREKNEVLKNRNTLSHRENTLQHEKIQTLDHNFEYSICQETLLEKAVFNTRKRENAEENNCDYNEFGRTFCDSSSLLFHQIPPSKDSHYEFSDCEKFLCVKSTLSKHDGVPVKHYDCGESGNNFRRKLCLSQLQKGDKGEKHFECNECGKAFWEKSHLTRHQRVHTGEKHFQCNQCGKTFWEKSNLTKHQRSHTGEKPFECNECGKAFSHKSALTLHQRTHTGEKPYQCNACGKTFYQKSDLTKHQRTHTGQKPYECYECGKSFCMNSHLTVHQRTHTGEKPFECLECGKSFCQKSHLTQHQRTHIGDKPYECNACGKTFYHKSVLTRHQIIHTGLKPYECYECGKTFCLKSDLTIHQRTHTGEKPFACPECGKFFSHKSTLSQHYRTHTGEKPYECHECGKIFYNKSYLTKHNRTHTGEKPYECNECGKTFCQKSQLTQHQRIHIGEKPYECNECGKAFCHKSALIVHQRTHTQEKPYKCNECGKSFCVKSGLILHERKHTGEKPYECNECGKSFSHKSSLTVHHRAHTGEKSCQCNECGKIFYRKSDLAKHQRSHTGEKPYECNTCRKTFSQKSNLIVHQRTHIGEKPYE

SEQ ID NO: 16109 - protein, 560 aa, Homo Sapiens; identical to SEQ ID NO: 14410

SEQ ID NO: 16110 - protein, 854 aa, Homo Sapiens
MAQAIFEALEGMDNQTVLAVQSLLDGQGAVPDPTGQSVNAPPAIQPLDDEDVFLCGKCKKQFNSLPAFMTHKREQCQGNAPALATVSLATNSIYPPSAAPTAVQQAPTPANRQISTYITVPPSPLIQTLVQGNILVSDDVLMSAMSAFTSLDQPMPQGPPPVQSSLNMHSVPSYLTQPPPPPPPPPPLPPPPPPQPPPPPPQSLGPPGRPNPGGNGVVEVYSAAAPLAGSGTVEIQALGMQPYPPLEVPNQCVEPPVYPTPTVYSPGKQGFKPKGPNPAAPMTSATGGTVATFDSPATLKTRRAKGARGLPEAAGKPKAQKLKCSYCDKSFTKNFDLQQHIRSHTGEKPFQCIACGRAFAQKSNVKKHMQTHKVWPPGHSGGTVSRNSVTVQVMALNPSRQEDEESTGLGQPLPGAPQPQALSTAGEEEGDKPESKQVVLIDSSYLCQFCPSKFSTYFQLKSHMTQHKNEQVYKCVVKSCAQTFPKLDTFLEHIKSHQEELSYRCHLCGKDFPSLYDLGVHQYSHSLLPQHSPKKDNAVYKCVKCVNKYSTPEALEHHLQTATHNFPCPHCQKVFPCERYLRRHLPTHGSGGRFKCQVCKKFFRREHYLKLHAHIHSGEKPYKCSVCESAFNRKDKLKRHMLIHEPFKKYKCPFSTHTGCSKEFNRPDKLKAHILSHSGMKLHKCALCSKSFSRRAHLAEHQRAHTGNYKFRCAGCAKGFSRHKYLKDHRCRLGPQKDKDLQTRRPPQRRAAPRSCGSGGRKVLTPLPDPLGLEELKDTGAGLVPEAVPGKPPFAEPDAVLSIVVGGAVGAETELVVPGHAEGLGSNLALAELQAGAEGPCAMLAVPVYIQASE

SEQ ID NO: 16111 - protein, 599 aa, Homo Sapiens
MMLPYPSALGDQYWEEILLPKNGENVETMKKLTQNHKAKGLPSNDTDCPQKKEGKAQIVVPVTFRDVTVIFTEAEWKRLSPEQRNLYKEVMLENYRNLLSLAEPKPEIYTCSSCLLAFSCQQFLSQHVLQIFLGLCAENHFHPGNSSPGHWKQQGQQYSHVSCWFENAEGQERGGGSKPWSARTEERETSRAFPSPLQRQSASPRKGNMVVETEPSSAQRPNPVQLDKGLKELETLRFGAINCREYEPDHNLESNFITNPRTLLGKKPYICSDCGRSFKDRSTLIRHHRIHSMEKPYVCSECGRGFSQKSNLSRHQRTHSEEKPYLCRECGQSFRSKSILNRHQWTHSEEKPYVCSECGRGFSEKSSFIRHQRTHSGEKPYVCLECGRSFCDKSTLRKHQRIHSGEKPYVCRECGRGFSQNSDLIKHQRTHLDEKPYVCRECGRGFCDKSTLIIHERTHSGEKPYVCGECGRGFSRKSLLLVHQRTHSGEKHYVCRECRRGFSQKSNLIRHQRTHSNEKPYICRECGRGFCDKSTLIVHERTHSGEKPYVCSECGRGFSRKSLLLVHQRTHSGEKHYVCRECGRGFSHKSNLIRHQRTH

SEQ ID NO: 16112 - protein, 488 aa, Homo Sapiens
MENLTKHSIECSSFRGDWECKNQFERKQGSQEGHFSEMIFTPEDMPTFSIQHQRIHTDEKLLECKECGKDFSFVSVLVRHQRIHTGEKPYECKECGKAFGSGANLAYHQRIHTGEKPFECKECGKAFGSGSNLTHHQRIHTGEKPYECKECGKAFSFGSGLIRHQIIHSGEKPYECKECGKSFSFESALIRHHRIHTGEKPYECIDCGKAFGSGSNLTQHRRIHTGEKPYECKACGMAFSSGSALTRHQRIHTGEKPYICNECGKAFSFGSALTRHQRIHTGEKPYVCKECGKAFNSGSDLTQHQRIHTGEKPYECKECEKAFRSGSKLIQHQRMHTGEKPYECKECGKTFSSGSDLTQHHRIHTGEKPYECKECGKAFGSGSKLIQHQLIHTGERPYECKECGKSFSSGSALNRHQRIHTGEKPYECKECGKAFYSGSSLTQHQRIHTGEKLYECKNCGKAYGRDSEFQQHKKSHNGKKLCELETIN

SEQ ID NO: 16113 - protein, 294 aa, Homo Sapiens
MEYPAPATVQAADGGAAGPYSSSELLEGQEPDGVRFDRERARRLWEAVSGAQPVGREEVEHMIQKNQCLFTNTQCKVCCALLISESQKLAHYQSKKHANKVKRYLAIHGMETLKGETKKLDSDQKSSRSKDKNQCCPICNMTFSSPVVAQSHYLGKTHAKNLKLKQQSTKVEALHQNREMIDPDKFCSLCHATFNDPVMAQQHYVGKKHRKQETKLKLMARYGRLADPAVTDFPAGKGYPCKTCKIVLNSIEQYQAHVSGFKHKNQSPKTVASSLGQIPMQRQPIQKDSTTLED

SEQ ID NO: 16114 - protein, 839 aa, Homo Sapiens
MALTQGQVTFRDVAIEFSQEEWTCLDPAQRTLYRDVMLENYRNLASLGISCFDLSIISMLEQGKEPFTLESQVQIAGNPDGWEWIKAVITALSSEFVMKDLLHKGKSNTGEVFQTVMLERQESQDIEGCSFREVQKNTHGLEYQCRDAEGNYKGVLLTQEGNLTHGRDEHDKRDARNKLIKNQLGLSLQSHLPELQLFQYEGKIYECNQVEKSFNNNSSVSPPQQMPYNVKTHISKKYLKDFISSLLLTQGQKANNWGSPYKSNGCGMVFPQNSHLASHQRSHTKEKPYKCYECGKAFRTRSNLTTHQVIHTGEKRYKCNECGKVFSRNSQLSQHQKIHTGEKPYKCNECGKVFTQNSHLVRHRGIHTGEKPYKCNECGKAFRARSSLAIHQATHSGEKPYKCNECGKVFTQNSHLTNHWRIHTGEKPYKCNECGKAFGVRSSLAIHLVIHTGEKPYKCHECGKVFRRNSHLARHQLIHTGEKPYKCNECGKAFRAHSNLTTHQVIHTGEKPYKCNECGKVFTQNSHLANHQRIHTGVKPYMCNECGKAFSVYSSLTTHQVIHTGEKPYKCNECGKVFTQNSHLARHRGIHTGEKPYKCNECGKVFRHNSYLSRHQRIHTGEKPYKYNEYGKAFSEHSNLTTHQVIHTGEKPYKCNECGKVFTQNSHLARHRRVHTGGKPYQCNECGKAFSQTSKLARHQRVHTGEKPYECNQCGKAFSVRSSLTTHQAIHTGKKPYKCNECGKVFTQNSHLARHRGIHTGEKPYKCNECGKAFSQTSKLARHQRIHTGEKPYECGKPFSICSSLTTHQTIHTGGKPYKCNVWKVLKSEFKPCKPSQNS

SEQ ID NO: 16115 - protein, 527 aa, Homo Sapiens
MTAELREAMALAPWGPVKVKKEEEEEENFPGQASSQQVHSENIKVWAPVQGLQTGLDGSEEEEKGQNISWDMAVVLKATQEAPAASTLGSYSLPGTLAKSEILETHGTMNFLGAETKNLQLLVPKTEICEEAEKPLIISERIQKADPQGPELGEACEKGNMLKRQRIKREKKDFRQVIVNDCHLPESFKEEENQKCKKSGGKYSLNSGAVKNPKTQLGQKPFTCSVCGKGFSQSANLVVHQRIHTGEKPFECHECGKAFIQSANLVVHQRIHTGQKPYVCSKCGKAFTQSSNLTVHQKIHSLEKTFKCNECEKAFSYSSQLARHQKVHITEKCYECNECGKTFTRSSNLIVHQRIHTGEKPFACNDCGKAFTQSANLIVHQRSHTGEKPYECKECGKAFSCFSHLIVHQRIHTAEKPYDCSECGKAFSQLSCLIVHQRIHSGDLPYVCNECGKAFTCSSYLLIHQRIHNGEKPYTCNECGKAFRQRSSLTVHQRTHTGEKPYECEKCGAAFISNSHLMRHHRTHLVE

SEQ ID NO: 16116 - protein, 532 aa, Homo Sapiens
MIQAQESITLEDVAVDFTWEEWQLLGAAQKDLYRDVMLENYSNLVAVGYQASKPDALFKLEQGEQLWTIEDGIHSGACSDIWKVDHVLERLQSESLVNRRKPCHEHDAFENIVHCSKSQFLLGQNHDIFDLRGKSLKSNLTLVNQSKGYEIKNSVEFTGNGDSFLHANHERLHTAIKFPASQKLISTKSQFISPKHQKTRKLEKHHVCSECGKAFIKKSWLTDHQVMHTGEKPHRCSLCEKAFSRKFMLTEHQRTHTGEKPYECPECGKAFLKKSRLNIHQKTHTGEKPYICSECGKGFIQKGNLIVHQRIHTGEKPYICNECGKGFIQKTCLIAHQRFHTGKTPFVCSECGKSCSQKSGLIKHQRIHTGEKPFECSECGKAFSTKQKLIVHQRTHTGERPYGCNECGKAFAYMSCLVKHKRIHTREKQEAAKVENPPAERHSSLHTSDVMQEKNSANGATTQVPSVAPQTSLNISGLLANRNVVLVGQPVVRCAASGDNRGFAQDRNLVNAVNVVVPSVINYVLFYVTENP

SEQ ID NO: 16117 - protein, 605 aa, Homo Sapiens
MAAGQREARPQVSLTFEDVAVLFTRDEWRKLAPSQRNLYRDVMLENYRNLVSLGLPFTKPKVISLLQQGEDPWEVEKDGSGVSSLGSKSSHKTTKSTQTQDSSFQGLILKRSNRNVPWDLKLEKPYIYEGRLEKKQDKKGSFQIVSATHKKIPTIERSHKNTELSQNFSPKSVLIRQQILPREKTPPKCEIQGNSLKQNSQLLNQPKITADKRYKCSLCEKTFINTSSLRKHEKNHSGEKLFKCKECSKAFSQSSALIQHQITHTGEKPYICKECGKAFTLSTSLYKHLRTHTVEKSYRCKECGKSFSRRSGLFIHQKIHAEENPCKYNPGRKASSCSTSLSGCQRIHSRKKSYLCNECGNTFKSSSSLRYHQRIHTGEKPFKCSECGRAFSQSASLIQHERIHTGEKPYRCNECGKGFTSISRLNRHRIIHTGEKFYNCNECGKALSSHSTLIIHERIHTGEKPCKCKVCGKAFRQSSALIQHQRMHTGERPYKCNECGKTFRCNSSLSNHQRIHTGEKPYRCEECGISFGQSSALIQHRRIHTGEKPFKCNTCGKTFRQSSSRIAHQRIHTGEKPYECNTCGKLFNHRSSLTNHYKIHIEEDP

SEQ ID NO: 16118 - protein, 612 aa, Homo Sapiens
MAAGQREARPQVSLTFEDVAVLFTWDEWRKLAPSQRNLYRDVMLENYRNLVSLGLSFTKPKVISLLQQGEDPWEVEKDSSGVSSLGCKSTPKMTKSTQTQDSFQEQIRKRLKRDEPWNFISERSCIYEEKLKKQQDKNENLQIISVAHTKILTVDRSHKNVEFGQNFYLKSVFIKQQRFAKEKTPSKCEIQRNSFKQNSNLLNQSKIKTAEKRYKCSTCEKAFIHNSSLRKHQKNHTGEKLFKCKECLKAFSQSSALIQHQRTHTGEKPYICKECGKAFSHSASLCKHLRTHTVEKCYRCKECGKSFSRRSGLFIHQKIHAQENPHKYNPGRKASSYSTSLSGSQKIHLRKKSYLCNECGNTFKSSSSLRYHQRIHTGEKPFKCSECGRAFSQSASLIQHERIHTGEKPYRCNECGKGFTSISRLNRHRIIHTGEKLYNCNECGKALSSHSTLIIHERIHTGEKPCKCKVCGKAFRQSSALIQHQRMHTGERPYKCNECDKTFRCNSSLSNHQRIHTGEKPYRCLECGMSFGQSAALIQHQRIHTGEKPFKCNTCGKTFRQSSSLIAHQRIHTGEKPYECNACGKLFSQRSSLTNHYKIHIEEDSLKADLHV

SEQ ID NO: 16119 - protein, 554 aa, Homo Sapiens [sequence omitted]

SEQ ID NO: 16120 - protein, 428 aa, Homo Sapiens
MRDEVAEKEKADINVTLVFQGYENTPIMVCVDGIVFSKPDLVTCLEQRKKPWSMKHPGLTQHNIVHTGDKPYKCKDCGKIFKWSSNLTIHQRIHSGEKPYKCEECGKAFKQSSKLNEHMRAHTGEKFYKCEECGKAFKHPSGLTLHKRIHTGENPYKFEECDKAFYWVLSFTKHMIIHRGEKPYKYQECGKAFKWSSNLTIHKRIHTGEKPCKCEECGKACKQSLGLTIQKRIHTEEKPYKCEECGSSNLTIYKKIHAGEKPYNCEKCGKAFYCSSNLIQNNIVHAEEKHYKCQECGKAFKKSLDLNVHKIIHSGEKPYRYEECGKITHSGEESYKCEECGKGFYCSSSLTKHMIVHTEEKLYKCEECGKAFKWSSELTIHQRIRTEEKPYKCEECVRVFKHSSKLNEHKRNHTGEKPYKCEACGKAF

SEQ ID NO: 16121 - protein, 568 aa, Homo Sapiens
MRRSVLVRNPGHKGLRPVYEELDSDSEDLDPNPEDLDPVSEDPEPDPEDLNTVPEDVDPSYEDLEPVSEDLDPDAEAPGSEPQDPDPMSSSFDLDPDVIGPVPLILDPNSDTLSPGDPKVDPISSGLTATPQVLATSPAVLPAPASPPRPFSCPDCGRAFRRSSGLSQHRRTHSGEKPYRCPDCGKSFSHGATLAQHRGIHTGARPYQCAACGKAFGWRSTLLKHRSSHSGEKPHHCPVCGKAFGHGSLLAQHLRTHGGPRPHKCPVCAKGFGQGSALLKHLRTHTGERPYPCPQCGKAFGQSSALLQHQRTHTAERPYRCPHCGKAFGQSSNLQHHLRIHTGERPYACPHCSKAFGQSSALLQHLHVHSGERPYRCQLCGKAFGQASSLTKHKRVHEGAAAAAAAAAAAAAAAAAGLGLGPGLSPASMMRPGQVSLLGPDAVSVLGSGLGLSPGTSSGRNPDPGSGPGTLPDPSSKPLPGSRSTPSPTPVESSDPKAGHDAGPDLVPSPDLDPVPSPDPDPVPSPDPNPVSCPDPCSPTRGTVSPALPTGESPEWVQEQGALLGPDG

SEQ ID NO: 16122 - protein, 420 aa, Homo Sapiens
MSRSSPSGKGHSRMAEPRFNNPYFWPPPPTMPSQLDNLVLINKIKEQLMAEKIRPPHLPPTSASSQQPLLVPPAPAESSQAVMSLPKLQQVPGLHPQAVPQPDVALHARPATSTVTGLGLSTRTPSVSTSESSAGAGTGTGTSTPSTPTTTSQSRLIASSPTLISGITSPPLLDSIKTIQGHGLLGPPKSERGRKKIKAENPGGPPVLVVPYPILASGETAKEGKTYRCKVCPLTFFTKSEMQIHSKSHTEAKPHKCPHCSKSFANASYLAQHLRIHLGVKPYHCSYCDKSFRQLSHLQQHTRIHTGDRPYKCPHPGCEKAFTQLSNLQSHQRQHNKDKPYKCPNCYRAYSDSASLQIHLSAHAIKHAKAYCCSMCGRAYTSETYLMKHMSKHTVVEHLVSHHSPQRTESPGIPVRISLI

SEQ ID NO: 16123 - protein, 216 aa, Homo Sapiens
MSALGQITITVSRCWNTERNQTDKNPCLHGAYLQLRETVKNKSTHLKKPLMKQAPPWKDHLTFQPLHPAERKTQVWRWQSGNSSDLETTSSASPWPTGSNRDVVLNTLAESCCGLSELITAPPYAGVSIQGFSQIWVLFPFCGGTFHHNEKDVLGLQDFERESVSTSQSRNISLLTLGQLQNCVIGKLTIIDLLTEHLLGVRHGVICFPWGLPSSS

SEQ ID NO: 16124 - protein, 407 aa, Homo Sapiens
MQQKAFEESRYPWQESFENVAVCLPLRCPRCGDHTRFRSLSSLRAHLEFSHSYEERTLLTKCSLFPSLKDTDLVTSSELLKPGKLQSSGNVVKQKPSYVNLYSISHEHSKDRKPFEVVAERPVSYVQTYTAMDLHADSLDGTRSGPGLPTSDTKASFEAHVREKFNRMVEAVDRTIEKRIDKLTKELAQKTAELLEVRAAFVQLTQKKQEVQRRERALNRQVDVAVEMIAVLRQRLTESEEELLRKEEEVVTFNHFLEAAAEKEVQGKARLQDFIENLLQRVELAEKQLEYYQSQQASGFVRDLSGHVLTDISSNRKPKCLSRGHPHSVCNHPDLKAHFHPKGRNHLKKAKDDRASMQPAKAIHEQAESSRDLCRPPKKGELLGFGRKGNIRPKMAKKKPTAIVNII

SEQ ID NO: 16125 - protein, 744 aa, Homo Sapiens
MQKEMKMIKDEDVHFDLAVKKTPSFPHCLQPVASRGKAPQRHPFPEALRGPFSQFRYEPPPGDLDGFPGVFEGAGSRKRKSMPTKMPYNHPAEEVTLALHSEENKNHGLPNLPLLFPQPPRPKYDSQMIDLCNVGFQFYRSLEHFGGKPVKQEPIKPSAVWPQPTPTPFLPTPYPYYPKVHPGLMFPFFVPSSSPFPFSRHTFLPKQPPEPLLPRKAEPQESEETKQKVERVDVNVQIDDSYYVDVGGSQKRWQCPTCEKSYTSKYNLVTHILGHSGIKPHACTHCGKLFKQLSHLHTHMLTHQGTRPHKCQVCHKAFTQTSHLKRHMMQHSEVKPHNCRVCGRGFAYPSELKAHEAKHASGRENICVECGLDFPTLAQLKRHLTTHRGPIQYNCSECDKTFQYPSQLQNHMMKHKDIRPYICSECGMEFVQPHHLKQHSLTHKGVKEHKCGICGREFTLLANMKRHVLIHTNIRAYQCHLCYKSFVQKQTLKAHMIVHSDVKPFKCKLCGKEFNRMHNLMGHMHLHSDSKPFKCLYCPSKFTLKGNLTRHMKVKHGVMERGLHSQGLGRGRIALAQTAGVLRSLEQEEPFDLSQKRRAKVPVFQSDGESAQGSHCHEEEEEDNCYEVEPYSPGLAPQSQQLCTPEDLSTKSEHAPEVLEEACKEEKEDASKGEWEKRSKGDLGAEGGQERDCAGRDECLSLRAFQSTRRGPSFSDYLYFKHRDESLKELLERKMEKQAVLLGI

SEQ ID NO: 16126 - protein, 350 aa, Homo Sapiens
MIRGFEAPMAENPPPPPPPVIFCHDSPKRVLVSVIRTTPIKPTCGGGGEPEPPPPLIPTSPGFSDFMVYPWRWGENAHNVTLSPGAAGAAASAALPAAAAAEHSGLRGRGAPPPAASASAAASGGEDEEEASSPDSGHLKDGIRRGRPRADTVRDLINEGEHSSSRIRCNICNRVFPREKSLQAHKRTHTGERPYLCDYPDCGKAFVQSGQLKTHQRLHTGEKPFVCSENGCLSRFTHANRHCPKHPYARLKREEPTDTLSKHQAADNKAAAEWLARYWEMREQRTPTLKGKLVQKADQEQQDPLEYLQSDEEDDEKRGAQRRLQEQRERLHGALALIELANLTGAPLRQ

SEQ ID NO: 16127 - protein, 561 aa, Homo Sapiens
MITSQGSVSFRDVTVGFTQEEWQHLDPAQRTLYRDVMLENYSHLVSVGYCIPKPEVILKLEKGEEPWILEEKFPSQSHLELINTSRNYSIMKFNEFNKGGKCFCDEKHEIIHSEEEPSEYNKNGNSFWLNEDLIWHQKIKNWEQSFEYNECGKAFPENSLFLVHKRGYTGQKTCKYTEHGKTCDMSFFITHQQTHPRENHYGNECGENIFEESILLEHQSVYPFSQKLNLTPIQRTHSINNIIEYNECGTFFSEKLVLHLQQRTHTGEKPYECHECGKTFTQKSAHTRHQRTHTGGKPYECHECGKTFYKNSDLIKHQRIHTGERPYGCHECGKSFSEKSTLTQHQRTHTGEKPYECHECGKTFSFKSVLTVHQKTHTGEKPYECYACGKAFLRKSDLIKHQRIHTGEKPYECNECGKSFSEKSTLTKHLRTHTGEKPYECIQCGKFFCYYSGFTEHLRRHTGEKPFGCNECGKTFRQKSALIVHQRTHIRQKPYGCNQCGKSFCVKSKLIAHHRTHTGEKPYECNVCGKSFYVKSKLTVHQRIHLGRNPINVVNEGNYSG

SEQ ID NO: 16128 - protein, 550 aa, Homo Sapiens
MPLQGSVSFKDVTVDFTQEEWQQLDPAQKALYRDVMLENYCHFVSVGFHMAKPDMIRKLEQGEELWTQRIFPSYSYLEEDGKTEDVLVKFKEYQDRHSRPLIFINHKKLIKERSNIYGKTFTLGKNRISKTILCEYKPDGKVLKNISELVIRNISPIKEKFGDSTGWEKSLLNTKHEKIHPAVNLHKQTERVLSGKQELIQHQKVQAPEQPFDHNECEKSFLMKGMLFTHTRAHRGERTFEYNKDGIAFIEKSSLSVHPSNLMEKKPSAYNKYGKFLCRKPVFIMPQRPQTEEKPFHCPYCGNNFRRKSYLIEHQRIHTGEKPYVCNQCGKAFRQKTALTLHEKTHIEGKPFICIDCGKSFRQKATLTRHHKTHTGEKAYECPQCGSAFRKKSYLIDHQRTHTGEKPYQCNECGKAFIQKTTLTVHQRTHTGEKPYICNECGKSFCQKTTLTLHQRIHTGEKPYICNECGKSFRQKAILTVHHRIHTGEKSNGCPQCGKAFSRKSNLIRHQKTHTGEKPYECKQCGKFFSCKSNLIVHQKTHKVETTGIQ

SEQ ID NO: 16129 - protein, 475 aa, Homo Sapiens
MAEGSVMFSDVSIDFSQEEWDCLDPVQRDLYRDVMLENYGNLVSMGLYTPKPQVISLLEQGKEPWMVGRELTRGLCSDLESMCETKLLSLKKEVYEIELCQREIMGLTKHGLEYSSFGDVLEYRSHLAKQLGYPNGHFSQEIFTPEYMPTFIQQTFLTLHQIINNEDRPYECKKCGKAFSQNSQFIQHQRIHIGEKSYECKECGKFFSCGSHVTRHLKIHTGEKPFECKECGKAFSCSSYLSQHQRIHTGKKPYECKECGKAFSYCSNLIDHQRIHTGEKPYECKVCGKAFTKSSQLFQHARIHTGEKPYECKECGKAFTQSSKLVQHQRIHTGEKPYECKECGKAFSSGSALTNHQRIHTGEKPYDCKECGKAFTQSSQLRQHQRIHAGEKPFECLECGKAFTQNSQLFQHQRIHTDEKPYECNECGKAFNKCSNLTRHLRIHTGEKPYNCKECGKAFSSGSDLIRHQGIHTNK

SEQ ID NO: 16130 - protein, 577 aa, Homo Sapiens
MEESHFNSNPYFWPSIPTVSGQIENTMFINKMKDQLLPEKGCGLAPPHYPTLLTVPASVSLPSGISMDTESKSDQLTPHSQASVTQNITVVPVPSTGLMTAGVSCSQRWRREGSQSRGPGLVITSPSGSLVTTASSAQTFPISAPMIVSALPPGSQALQVVPDLSKKVASTLTEEGGGGGGGGGSVAPKPPRGRKKKRMLESGLPEMNDPYVLSPEDDDDHQKDGKTYRCRMCSLTFYSKSEMQIHSKSHTETKPHKCPHCSKTFANSSYLAQHIRIHSGAKPYSCNFCEKSFRQLSHLQQHTRIHSKMHTETIKPHKCPHCSKTFANTSYLAQHLRIHSGAKPYNCSYCQKAFRQLSHLQQHTRIHTGDRPYKCAHPGCEKAFTQLSNLQSHRRQHNKDKPFKCHNCHRAYTDAASLEVHLSTHTVKHAKVYTCTICSRAYTSETYLMKHMRKHNPPDLQQQVQAAAAAAAVAQAQAQAQAQAQAQAQAQAQAQASQASQQQQQQQQQQQQQQQQPPPHFQSPGAAPQGGGGGDSNPNPPPQCSFDLTPYKTAEHHKDICLTVTTSTIQVEHLASS

SEQ ID NO: 16131 - protein, 386 aa, Homo Sapiens
MILGSLSRAGPLPLLRQPPIMQPPLDLKQILPFPLEPAPTLGLFSNYSTMDPVQKAVLSHTFGGPLLKTKRPVISCNICQIRFNSQSQAEAHYKGNRHARRVKGIEAAKTRGREPGVREPGDPAPPGSTPTNGDGVAPRPVSMENGLGPAPGSPEKQPGSPSPPSIPETGQGVTKGEGGTPAPASLPGGSKEEEEKAKRLLYCALCKVAVNSLSQLEAHNKGTKHKTILEARSGLGPIKAYPRLGPPTPGEPEAPAQDRTFHCEICNVKVNSEVQLKQHISSRRHRDGVAGKPNPLLSRHKKSRGAGELAGTLTFSKELPKSLAGGLLPSPLAVAAVMAAAAGSPLSLRPAPAAPLLQGPPITHPLLHPAPGPIRTAHGPILFSPY

SEQ ID NO: 16132 - protein, 471 aa, Homo Sapiens
MNMANFLRGFEEKGIKNDRPEDQLSKEKKKILFSFCEVCNIQLNSAAQAQVHSNGKSHRKRVKQLSDGQPPPPAQASPSSNSSTGSTCHTTTLPALVRTPTLMMQPSLDIKPFMSFPVDSSSAVGLFPNFNTMDPVQKAVINHTFGVSIPPKKKQVISCNVCQLRFNSDSQAEAHYKGSKHAKKVKALDATKNKPKMVPSKDSAKANPSCSITPITGNNSDKSEDKGKLKASSSSQPSSSESGSFLLKSGTTPLPPGAATSPSKSTNGAPGTVVESEEEKAKKLLYCSLCKVAVNSLSQLEAHNTGSKHKTMVEARNGAGPIKSYPRPGSRLKMQNGSKGSGLQNKTFHCEICDVHVNSEIQLKQHISSRRHKDRVAGKPLKPKYSPYNKLQRSPSILAAKLAFQKDMMKPLAPAFLSSPLAAAAAVSSALSLPPRPSASLFQAPAIPPALLRPGHGPIRATPASILFAPY

SEQ ID NO: 16133 - protein, 424 aa, Homo Sapiens
MGLAAGPASGAPSPLLASLPLPTRPLQPPLDFKHLLAFHFNGAAPLSLFPNFSTMDPVQKAVISHTFGVPSPLKKKLFISCNICHLRFNSANQAEAHYKGHKHARKLKAVEAAKSKQRPHTQAQDGAVVSPIPTLASGAPGEPQSKVPAAPPLGPPLQPPPTPDPTCREPAHSELLDAASSSSSSSCPPCSPEPGREAPGPEPAAAAVGSSMSGEGRSEKGHLYCPTCKVTVNSASQLQAHNTGAKHRWMMEGQRGAPRRSRGRPVSRGGAGHKAKRVTGGRGGRQGPSPAFHCALCQLQVNSETQLKQHMSSRRHKDRLAGKTPKPSSQHSKLQKHAALAVSILKSKLALQKQLTKTLAARFLPSPLPTAATAICALPGPLALRPAPTAATTLFPAPILGPALFRTPAGAVRPATGPIVLAPY

SEQ ID NO: 16134 - protein, 395 aa, Homo Sapiens
MRNIMYFGGTCQSPALPALVRPPAPPLQPSLDIKPFLPFPLDTAAAVNLFPNFNAMDPIQKAVINHTFGVPLPHRRKQIISCNICQLRFNSDSQAAAHYKGTKHAKKLKALEAMKNKQKSVTAKDSAKTTFTSITTNTINTSSDKTDGTAGTPAISTTTTVEIRKSSVMTTEITSKVEKSPTTATGNSSCPSTETEEEKAKRLLYCSLCKVAVNSASQLEAHNSGTKHKTMLEARNGSGTIKAFPRAGVKGKGPVNKGNTGLQNKTFHCEICDVHVNSETQLKQHISSRRHKDRAAGKPPKPKYSPYNKLQKTAHPLGVKLVFSKEPSKPLAPRILPNPLAAAAAAAAVAVSSPFSLRTAPAATLFQTSALPPALLRPAPGPIRTAHTPVLFAPY

SEQ ID NO: 16135 - protein, 358 aa, Homo Sapiens
MESLRGNTAQGPTNEEDYKNEGQLSRQTKCPAQKKSSFENTVVRKVSVTLKEIFTGEEGPESSEFSLSPNLDAQQKIPKGHGSPISRKNSKDNSDLIKHQRLFSQRKPCKCNECEKAFSYQSDLLVHSRIHGGEKPFECNKCGKSFSRSTHLIEHQRTHTGEKPYECNECGKAFSRSTHLSLHQRIHTGEKPYECSECGKAFSRSTNLSQHQRTHTQERPYKCNECGKAFGDRSTIIQHQRIHTGENPYECSKCGKAFSWISSLTEHQRTHTGENPYECSECGKVFSRSSSLTEHQRIHSGEKPHECRVCGKGFSRSSSLIIHQRTHTGEKPYKCNDCGKAFCQSSTLIRHQHLHTKE

SEQ ID NO: 16136 - protein, 561 aa, Homo Sapiens
MNSSLTAQRRGSDAELGPWVMAARSKDAAPSQRDGLLPVKVEEDSPGSWEPNYPAASPDPETSRLHFRQLRYQEVAGPEEALSRLRELCRRWLRPELLSKEQILELLVLEQFLTILPEELQAWVREHCPESGEEAVAVVRALQRALDGTSSQGMVTFEDTAVSLTWEEWERLDPARRDFCRESAQKDSGSTVPPSLESRVENKELIPMQQILEEAEPQGQLQEAFQGKRPLFSKCGSTHEDRVEKQSGDPLPLKLENSPEAEGLNSISDVNKNGSIEGEDSKNNELQNSARCSNLVLCQHIPKAERPTDSEEHGNKCKQSFHMVTWHVLKPHKSDSGDSFHHSSLFETQRQLHEERPYKCGNCGKSFKQRSDLFRHQRIHTGEKPYGCQECGKSFSQSAALTKHQRTHTGEKPYTCLKCGERFRQNSHLNRHQSTHSRDKHFKCEECGETCHISNLFRHQRLHKGERPYKCEECEKSFKQRSDLFKHHRIHTGEKPYGCSVCGKRFNQSATLIKHQRIHTGEKPYKCLECGERFRQSTHLIRHQRIHQNKVLSAGRGGSRL

SEQ ID NO: 16137 - protein, 513 aa, Homo Sapiens
MASVLSRRLGKRSLLGARVLGPSASEGPSAAPPSEPLLEGAAPQPFTTSDDTPCQEQPKEVLKAPSTSGLQQVAFQPGQKVYVWYGGQECTGLVEQHSWMEGQVTVWLLEQKLQVCCRVEEVWLAELQGPCPQAPPLEPGAQALAYRPVSRNIDVPKRKSDAVEMDEMMAAMVLTSLSCSPVVQSPPGTEANFSASRAACDPWKESGDISDSGSSTTSGHWSGSSGVSTPSPPHPQASPKYLGDAFGSPQTDHGFETDPDPFLLDEPAPRKRKNSVKVMYKCLWPNCGKVLRSIVGIKRHVKALHLGDTVDSDQFKREEDFYYTEVQLKEESAAAAAAAAAGTPVPGTPTSEPAPTPSMTGLPLSALPPPLHKAQSSGPEHPGPESSLPSGALSKSAPGSFWHIQADHAYQALPSFQIPVSPHIYTSVSWAAAPSAACSLSPVRSRSLSFSEPQQPAPAMKSHLIVTSPPRAQSGARKARGEAKKCRKVYGIEHRDQWCTACRWKKACQRFLD

SEQ ID NO: 16138 - protein, 335 aa, Homo Sapiens
MSAKLGKSSSLLTQTSEECNGILTEKMEEEEQTCDPDSSLHWSSSYSPETFRQQFRQFGYQDSPGPHEALSRLWELCHLWLRPEVHTKEQILELLVLEQFLAILPKELQAWVQKHHPENGEETVTMLEDVERELDGPKQIFFGRRKDMIAEKLAPSEITEELPSSQLMPVKKQLQGASWELQSLRPHDEDIKTTNVKSASRQKTSLGIELHCNVSNILHMNGSQSSTYRGTYEQDGRFEKRQGNPSWKKQQKCDECGKIFSQSSALILHQRIHSGKKPYACDECAKAFSRSAILIQHRRTHTGEKPYKCHDCGKAFSQSSNLFRHRKRHIRKKVP

SEQ ID NO: 16139 - protein, 534 aa, Homo Sapiens
MAVESGVISTLIPQDPPEQELILVKVEDNFSWDEKFKQNGSTQSCQELFRQQFRKFCYQETPGPREALSRLQELCYQWLMPELHTKEQILELLVLEQFLSILPEELQIWVQQHNPESGEEAVTLLEDLEREFDDPGQQVPASPQGPAVPWKDLTCLRASQESTDIHLQPLKTQLKSWKPCLSPKSDCENSETATKEGISEEKSQGLPQEPSFRGISEHESNLVWKQGSATGEKLRSPSQGGSFSQVIFTNKSLGKRDLYDEAERCLILTTDSIMCQKVPPEERPYRCDVCGHSFKQHSSLTQHQRIHTGEKPYKCNQCGKAFSLRSYLIIHQRIHSGEKAYECSECGKAFNQSSALIRHRKIHTGEKACKCNECGKAFSQSSYLIIHQRIHTGEKPYECNECGKTFSQSSKLIRHQRIHTGERPYECNECGKAFRQSSELITHQRIHSGEKPYECSECGKAFSLSSNLIRHQRIHSGEEPYQCNECGKTFKRSSALVQHQRIHSGDEAYICNECGKAFRHRSVLMRHQRVHTIK

SEQ ID NO: 16140 - protein, 642 aa, Homo Sapiens
MAEAAPAPTSEWDSECLTSLQPLPLPTPPAANEAHLQTAAISLWTVVAAVQAIERKVEIHSRRLLHLEGRTGTAEKKLASCEKTVTELGNQLEGKWAVLGTLLQEYGLLQRRLENLENLLRNRNFWILRLPPGIKGDIPKVPVAFDDVSIYFSTPEWEKLEEWQKELYKNIMKGNYESLISMDYAINQPDVLSQIQPEGEHNTEDQAGPEESEIPTDPSEEPGISTSDILSWIKQEEEPQVGAPPESKESDVYKSTYADEELVIKAEGLARSSLCPEVPVPFSSPPAAAKDAFSDVAFKSQQSTSMTPFGRPATDLPEASEGQVTFTQLGSYPLPPPVGEQVFSCHHCGKNLSQDMLLTHQCSHATEHPLPCAQCPKHFTPQADLSSTSQDHASETPPTCPHCARTFTHPSRLTYHLRVHNSTERPFPCPDCPKRFADQARLTSHRRAHASERPFRCAQCGRSFSLKISLLLHQRGHAQERPFSCPQCGIDFNGHSALIRHQMIHTGERPYPCTDCSKSFMRKEHLLNHRRLHTGERPFSCPHCGKSFIRKHHLMKHQRIHTGERPYPCSYCGRSFRYKQTLKDHLRSGHNGGCGGDSDPSGQPPNPPGPLITGLETSGLGVNTEGLETNQWYGEGSGGGVL

SEQ ID NO: 16141 - protein, 552 aa, Homo Sapiens
MARVPLTFSDVAIDFSQEEWEYLNSDQRDLYRDVMLENYTNLVSLDFNFTTESNKLSSEKRNYEVNAYHQETWKRNKTFNLMRFIFRTDPQYTIEFGRQQRPKVGCFSQMIFKKHKSLPLHKRNNTREKSYECKEYKKGFRKYLHLTEHLRDHTGVIPYECNECGKAFVVFQHFIRHRKIHTDLKPYECNGCEKAFRFYSQLIQHQIIHTGMKPYECKQCGKAFRRHSHLTEHQKIHVGLKPFECKECGETFRLYRHMCLHQKIHHGVKPYKCKECGKAFGHRSSLYQHKKIHSGEKPYKCEQCEKAFVRSYLLVEHQRSHTGEKPHECMECGKAFGKGSSLLKHKRIHSSEKLYDCKDCGKAFCRGSQLTQHQRIHTGEKPHECKECGKTFKLHSYLIQHQIIHTDLKPYECKQCGKAFSRVGDLKTHQSIHAGEKPYECKECGKTFRLNSQLIYHQTIHTGLKPYVCKECKKAFRSISGLSQHKRIHTGEKPYECKECDKAFNRSDRLTQHETIHTGVKPQKCKECGKAFSHCYQLSQHQRFHHGERLLM

SEQ ID NO: 16142 - protein, 2248 aa, Homo Sapiens
MMDSENKPENDEDEKINKEAQDLTKLSSHNEDGGPVSDVIASFPENSMGKRGFSESSNSDSVVIGEDRNKHASKRRKLDEAEPLKSGKQGICRLETSESSVTEGGIALDETGKETFLSDCTVGGTCLPNALSPSCNFSTIDVVSLKTDTEKTSAQEMVSLDLERESPFPPKEISVSCTIGNVDTVLKCSICGHLFSSCSDLEKHAESHMQQPKEHTCCHCSHKAESSSALHMHIKQAHGPQKVFSCDLCGFQCSEENLLNAHYLGKTHLRRQNLAARGGFVQILTKQPFPKKSRTMATKNVHSKPRTSKSIAKNSDSKGLRNVGSTFKDFRGSISKQSGSSSELLVEMMPSRNTLSQEVEIVEEHVTSLGLAQNPENQSRKLDTLVTSEGLLEKLESTKNTLQAAHGNSVTSRPRPERNILVLGNSFRRRSSTFTLKGQAKKRFNLLGIKRGTSETQRMYMKHLRTQMKTHDAESVLKHLEACSSVQRVCVTTSETQEAEQGQGSARPPDSGLHSLTVKPASGSQTLCACTDCGQVATNRTDLEIHVKRCHAREMKFYCRTCDFSSMSRRDLDEHLHSNQHQQTASVLSCQCCSFISLDEINLRDHMKEKHNMHFLCTPCNLFFLSEKDVEEHKATEKHINSLVQPKTLQSSNSDLVLQTLPLSTLESENAKESMDDSGKASQEEPLKSRVSHGNEVRHSSKPQFQCKKCFYKTRSSTVLTRHIKLRHGQDYHFLCKACNLYSLSKEGMEKHIKRSKHLENAKKNNIGLSFEECIERVCIGANDKKEEFDVSGNGRIEGHIGVQLQEHSYLEKGMLASEELSQSGGSTKDDELASTTTPKRGRPKGNISRTCSHCGLLASSITNLTVHIRRKHSHQYSYLCKVCKYYTVTKGDMERHCATKKHKGRVEIEASGKHSSDIIVGPEGGSLEAGKKNAGSAVTMSDEHANKPAESPTSVLEKPDRGNSIEAEVENVFHSLDGEVNSHLLDKKEQISSEPEDFAQPGDVYSQRDVTGTGENKCLHCEFSAHSSASLELHVKRKHTKEFEFYCMACDYYAVTRREMTRHAATEKHKMKRQSYLNSANVEAGSADMSKNIIMPEEEHQQNSEEFQIISGQPSDTLKSRNAADCSILNENTNLDMSKVLCAADSVEVETEEESNFNEDHSFCETFQQAPVKDKVRKPEEMMSLTMSSNYGSPSRFQNENSGSSALNCETAKKNHEISNDAGELRVHCEGEGGNAGDGGGVVPHRHLCPVTLDGERSAESPVLVVTRITREQGNLESGGQNRVARGHGLEDLKGVQEDPVLGNKEILMNSQHETEFILEEDGPASDSTVESSDVYETIISIDDKGQAMYSFGRFDSSIIRIKNPEDGELIDQSEEGLIATGVRISELPLKDCAQGVKKKKSEGSSIGESTRIRCDDCGFLADGLSGLNVHIAMKHPTKEKHFHCLLCGKSFYTESNLHQHLASAGHMRNEQASVEELPEGGATFKCVKCTEPFDSEQNLFLHIKGQHEELLREVNKYIVEDTEQINREREENQGNVCKYCGKMCRSSNSMAFLAHIRTHTGSKPFKCKICHFATAQLGDARNHVKRHLGMREYKCHVCGVAFVMKKHLNTHLLGKHGVGTPKERKFTCHLCDRSFTEKWALNNHMKLHTGEKPFKCTWPTCHYSFLTASAMKDHYRTHTGEKSFLCDLCGFAGGTRHALTKHRRQHTGEKPFKCDECNFASTTQSHLTRHKRVHTGEKPYRCPWCDYRSNCAENIRKHILHTGKHEGVKMYNCPKCDYGTNVPVEFRNHLKEQHPDIENPDLAYLHAGIVSKSYECRLKGQGATFVETDSPFTAAALAEEPLVKEKPLRSSRRPAPPPEQVQQVIIFQGYDGEFALDPSVEETAAATLQTLAMAGQVARVVHITEDGQVIATSQSGAHVGSVVPGPILPEQLADGATQVVVVGGSMEGHGMDESLSPGGAVIQQVTKQEILNLSEAGVAPPEASSALDALLCAVTELGEVEGRAGLEEQGRPGAKDVLIQLPGQEVSHVAADPEAPEIQMFPQAQESPAAVEVLTQVVHPSAAMASQERAQVAFKKMVQGVLQFAVCDTAAAGQLVKDGVTQVVVSEEGAVHMVAGEGAQIIMQEAQGEHMDLVESDGEISQIIVTEELVQAMVQESSGGFSEGTTHYILTELPPGVQDEPGLYSHTVLETADSQELLQAGATLGTEAGAPSRAEQLASVVIYTQEGSSAAAAIQSQRESSELQEA

SEQ ID NO: 16143 - protein, 720 aa, Homo Sapiens
MEEAEELLLEGKKALQLAREPRLGLDLGWNPSGEGCTQGLKDVPPEPTRDILALKSLPRGLALGPSLAKEQRLGVWCVGDPLQPGLLWGPLEEESASKEKGEGVKPRQEENLSLGPWGDVCACEQSSGWTSLVQRGRLESEGNVAPVRISERLHLQVYQLVLPGSELLLWPQPSSEGPSLTQPGLDKEAAVAVVTEVESAVQQEVASPGEDAAEPCIDPGSQSPSGIQAENMVSPGLKFPTQDRISKDSQPLGPLLQDGDVDEECPAQAQMPPELQSNSATQQDPDGSGASFSSSARGTQPHGYLAKKLHSPSDQCPPRAKTPEPGAQQSGFPTLSRSPPGPAGSSPKQGRRYRCGECGKAFLQLCHLKKHAFVHTGHKPFLCTECGKSYSSEESFKAHMLGHRGVRPFPCPQCDKAYGTQRDLKEHQVVHSGARPFACDQCGKAFARRPSLRLHRKTHQVPAAPAPCPCPVCGRPLANQGSLRNHMRLHTGEKPFLCPHCGRAFRQRGNLRGHLRLHTGERPYRCPHCADAFPQLPELRRHLISHTGEAHLCPVCGKALRDPHTLRAHERLHSGERPFPCPQCGRAYTLATKLRRHLKSHLEDKPYRCPTCGMGYTLPQSLRRHQLSHRPEAPCSPPSVPSAASEPTVVLLQAEPQLLDTHREEEVSPARDVVEVTISESQEKCFVVPEEPDAAPSLVLIHKDMGLGAWAEVVEVEMGT

SEQ ID NO: 16144 - protein, 821 aa, Homo Sapiens
MAANGDSPPWSPALAAEGRGSSCEVRRERTPEARIHSVKRYPDLSPGPKGRSSADHAALNSIVSLQASVSFEDVTVDFSKEEWQHLDPAQRRLYWDVTLENYSHLLSVGYQIPKSEAAFKLEQGEGPWMLEGEAPHQSCSGEAIGKMQQQGIPGGIFFHCERFDQPIGEDSLCSILEELWQDNDQLEQRQENQNNLLSHVKVLIKERGYEHKNIEKIIHVTTKLVPSIKRLHNCDTILKHTLNSHNHNRNSATKNLGKIFGNGNNFPHSPSSTKNENAKTGANSCEHDHYEKHLSHKQAPTHHQKIHPEEKLYVCTECVMGFTQKSHLFEHQRIHAGEKSRECDKSNKVFPQKPQVDVHPSVYTGEKPYLCTQCGKVFTLKSNLITHQKIHTGQKPYKCSECGKAFFQRSDLFRHLRIHTGEKPYECSECGKGFSQNSDLSIHQKTHTGEKHYECNECGKAFTRKSALRMHQRIHTGEKPYVCADCGKAFIQKSHFNTHQRIHTGEKPYECSDCGKSFTKKSQLHVHQRIHTGEKPYICTECGKVFTHRTNLTTHQKTHTGEKPYMCAECGKAFTDQSNLIKHQKTHTGEKPYKCNGCGKAFIWKSRLKIHQKSHIGERHYECKDCGKAFIQKSTLSVHQRIHTGEKPYVCPECGKAFIQKSHFIAHHRIHTGEKPYECSDCGKCFTKKSQLRVHQKIHTGEKPNICAECGKAFTDRSNLITHQKIHTREKPYECGDCGKTFTWKSRLNIHQKSHTGERHYECSKCGKAFIQKATLSMHQIIHTGKKPYACTECQKAFTDRSNLIKHQKMHSGEKRYKASD

SEQ ID NO: 16145 - protein, 478 aa, Homo Sapiens
MLSDELESKPELLVQFVQNTSIPLGQGLVESEAKDITCLSLLPVTEASECSRLMLPDDTTNHSNSSKEVPSSAVLRSLRVNVGPDGEETRAQTVQKSPEFLSTSESSSLLQDLQPSDSTSFILLNLTRAGLGSSAEHLVFVQDEAEDSGNDFLSSESTDSSIPWFLRVQELAHDSLIAATRAQLAKNAKTSSNGENVHLGSGDGQSKDSGPLPQVEKKLKCTVEGCDRTFVWPAHFKYHLKTHRNDRSFICPAEGCGKSFYVLQRLKVHMRTHNGEKPFMCHESGCGKQFTTAGNLKNHRRIHTGEKPFLCEAQGCGRSFAEYSSLRKHLVVHSGEKPHQCQVCGKTFSQSGSRNVHMRKHHLQLGAAGSQEQEQTAEPLMGSSLLEEASVPSKNLVSMNSQPSLGGESLNLPNTNSILGVDDEVLAEGSPRSLSSVPDVTHHLVTMQSGRQSYEVSVLTAVNPQELLNQGDLTERRT

SEQ ID NO: 16146 - protein, 312 aa, Homo Sapiens
MEEKPSGPIPDMLATAEPSSSETDKEVLSPAVPAAAPSSSMSEEPGPEQAATPPVWERGGAGGMQQGSSPAPDSCQPGPGPSPGLTSIVSGTSEDLRPPRRRPPPGKQIPCSSPGCCLSFPSVRDLAQHLRTHCPPTQSLEGKLFRCSALSCTETFPSMQELVAHSKLHYKPNRYFKCENCLLRFRTHRSLFKHLHVCAEHAQSPAPPPPPALDREPPAPERPPEVDPASAPGLPFPLLEPFTTPAPAPTGPFLPYLNPAPFGLSPPRLRPFLAAAPGPPASSAAVWKKSQGAGSSPRRPQGGSDAPSGACR

SEQ ID NO: 16147 - protein, 603 aa, Homo Sapiens
MPELYTEDFIQGCDVGELQEPGLPGVLSYVGAQERALDHRKPSTSSKKTKRVEIDQRCENRLECNGAISAHCNLRLPDSNDSPASASRVAGITDLSRNCVIKELAPQQEGNPGEVFHTVTLEQHEKHDIEEFCFREIKKKIHDFDCQWRDDERNCNKVTTAPKENLTCRRDQRDRRGIGNKSIKHQLGLSFLPHPHELQQFQAEGKIYECNHVEKSVNHGSSVSPPQIISSTIKTHVSNKYGTDFICSSLLTQEQKSCIREKPYRYIECDKALNHGSHMTVRQVSHSGEKGYKCDLCGKVFSQKSNLARHWRVHTGEKPYKCNECDRSFSRNSCLALHRRVHTGEKPYKCYECDKVFSRNSCLALHQKTHIGEKPYTCKECGKAFSVRSTLTNHQVIHSGKKPYKCNECGKVFSQTSSLATHQRIHTGEKPYKCNECGKVFSQTSSLARHWRIHTGEKPYKCNECGKVFSYNSHLASHRRVHTGEKPYKCNECGKAFSVHSNLTTHQVIHTGEKPYKCNQCGKGFSVHSSLTTHQVIHTGEKPYKCNECGKSFSVRPNLTRHQIIHTGKKPYKCSDCGKSFSVRPNLFRHQIIHTKEKPYKRN

SEQ ID NO: 16148 - protein, 594 aa, Homo Sapiens
MAAAVLRDSTSVPVTAEAKLMGFTQGCVTFEDVAIYFSQEEWGLLDEAQRLLYRDVMLENFALITALVCWHGMEDEETPEQSVSVEGVPQVRTPEASPSTQKIQSCDMCVPFLTDILHLTDLPGQELYLTGACAVFHQDQKHHSAEKPLESDMDKASFVQCCLFHESGMPFTSSEVGKDFLAPLGILQPQAIANYEKPNKISKCEEAFHVGISHYKWSQCRRESSHKHTFFHPRVCTGKRLYESSKCGKACCCECSLVQLQRVHPGERPYECSECGKSFSQTSHLNDHRRIHTGERPYVCGQCGKSFSQRATLIKHHRVHTGERPYECGECGKSFSQSSNLIEHCRIHTGERPYECDECGKAFGSKSTLVRHQRTHTGEKPYECGECGKLFRQSFSLVVHQRIHTTARPYECGQCGKSFSLKCGLIQHQLIHSGARPFECDECGKSFSQRTTLNKHHKVHTAERPYVCGECGKAFMFKSKLVRHQRTHTGERPFECSECGKFFRQSYTLVEHQKIHTGLRPYDCGQCGKSFIQKSSLIQHQVVHTGERPYECGKCGKSFTQHSGLILHRKSHTVERPRDSSKCGKPYSPRSNIV

SEQ ID NO: 16149 - protein, 575 aa, Homo Sapiens
MAAAAPRRPTQQGTVTFEDVAVNFSQEEWCLLSEAQRCLYRDVMLENLALISSLGCWCGSKDEEAPCKQRISVQRESQSRTPRAGVSPKKAHPCEMCGLILEDVFHFADHQETHHKQKLNRSGACGKNLDDTAYLHQHQKQHIGEKFYRKSVREASFVKKRKLRVSQEPFVFREFGKDVLPSSGLCQEAAAVEKTDSETMHGPPFQEGKTNYSCGKRTKAFSTKHSVIPHQKLFTRDGCYVCSDCGKSFSRYVSFSNHQRDHTAKGPYDCGECGKSYSRKSSLIQHQRVHTGKTAYPCEECGKSFSQKGSLISHQRVHTGERPYECREYGKSFGQKGNLIQHQQGHTGERAYHCGECGKSFRQKFCFINHQRVHTGERPYKCGECGKSFGQKGNLVQHQRGHTGERPYECKECGKSFRYRSHLTEHQRLHTGERPYNCRECGKLFNRKYHLLVHERVHTGERPYACEVCGKLFGNKNCVTIHQRIHTGERPYECNECGKSFLSSSALHVHKRVHSGQKPYKCSECGKSFAECSSLIKHRRIHTGERPYECTKCGKTFQRSSTLLHHQSSHRRKAL

SEQ ID NO: 16150 - protein, 676 aa, Homo Sapiens
MQGTVAFEDVAVNFSQEEWSLLSEVQRCLYHDVMLENWVLISSLGCWCGSEDEEAPSKKSISIQRVSQVSTPGAGVSPKKAHSCEMCGAILGDILHLADHQGTHHKQKLHRCEAWGNKLYDSSNRPHQNQYLGEKPYRSSVEEALFVKRCKFHVSEESSIFIQSGKDFLPSSGLLLQEATHTGEKSNSKPECESPFQWGDTHYSCGECMKHSSTKHVFVQQQRLPSREECYCWECGKSFSKYDSVSNHQRVHTGKRPYECGECGKSFSHKGSLVQHQRVHTGKRPYECGECGKSFSHKGSLVQHQRVHTGERPYECGECGKSFSQNGTLIKHQRVHTGERPYECEECGKCFTQKGNLIQHQRGHTSERPYECEECGKCFSQKGTLTEHHRVHTRERPYECGECGKSFSRKGHLRNHQRGHTGERPYECGECGKSFSRKGNLIQHQRSHTGERPYECRECRKLFRGKSHLIEHQRVHTGERPYECNECGKSFQDSSGFRVHQRVHTGEKPFECSECGKSFPQSCSLLRHRRVHTGERPYECGECGKSFHQSSSLLRHQKTHTAERPYECRECGKFFSSLLEHRRVHTGERPYECRECGKTFTRRSAHFKHQRLHTRGKPYECSECGKSFAETFSLTEHRRVHTGERPYECSECGKSFHRSSSLLRHQRVHTERSPYK

SEQ ID NO: 16151 - protein, 510 aa, Homo Sapiens; identical to SEQ ID NO: 14420

SEQ ID NO: 16152 - protein, 688 aa, Homo Sapiens
MARKLVMFRDVAIDFSQEEWECLDSAQRDLYRDVMLENYSNLVSLDLPSRCASKDLSPEKNTYETELSQWEMSDRLENCDLEESNSRDYLEAKGKMEKQQENQKEYFRQGMIIYDKMSIFNQHTYLSQHSRCHSTEKPYKCKECGKAFRRASHLTQHQSIHTGEKPYECKQCGKAFSRDSQLSLHQRLHTGEKPYACKECGKAFTQSSQLILHHRIHTGEKPYKCEECGKAFIRSSQLTRHQKVHTGEKPYECKECGKAFTQNSQLTLHQRLHTGEKLYECKECRKVFTQLSQLILHKRIHTGEKPYECKECGKAFICGSQLSQHQKIHNGEKPYECKECGRAFIRGSLLMQHQRIHTGEKPYKCEECGKAFIRGSQLTQHQRIHTNEKPYECKECGKMFSHGSQLTQHQRIHTGEKPYQCKECGKAFNRGSLLTRHQRIHTGEKPYECKECGKTFSRGSELTQHERIHTGEKPYECKECGKSFIRGSQLTQHQRIHTGEKPYECKECRMAFTQSSHLSQHQRLHTGEKPYVCNECGKAFARGLLLIQHQRIHTGEKPYQCKECGKAFIRGSQLTQHQRIHTGEKPYECKECGKAFSHGSQLTLHQRIHTGEKPYECRECRKAFTQSSHLSRHQRIHTGEKPYQCKECGKAFTRGSQLTQHQRIHISEKSFEYKECGIDFSHGSQVYM

SEQ ID NO: 16153 - protein, 1284 aa, Homo Sapiens
MHKKRVEEGEASDFSLAWDSSVTAAGGLEGEPECDQKTSRALEDRNSVTSQEERNEDDEDMEDESIYTCDHCQQDFESLADLTDHRAHRCPGDGDDDPQLSWVASSPSSKDVASPTQMIGDGCDLGLGEEEGGTGLPYPCQFCDKSFIRLSYLKRHEQIHSDKLPFKCTYCSRLFKHKRSRDRHIKLHTGDKKYHCHECEAAFSRSDHLKIHLKTHSSSKPFKCTVCKRGFSSTSSLQSHMQAHKKNKEHLAKSEKEAKKDDFMCDYCEDTFSQTEELEKHVLTRHPQLSEKADLQCIHCPEVFVDENTLLAHIHQAHANQKHKCPMCPEQFSSVEGVYCHLDSHRQPDSSNHSVSPDPVLGSVASMSSATPDSSASVERGSTPDSTLKPLRGQKKMRDDGQGWTKVVYSCPYCSKRDFNSLAVLEIHLKTIHADKPQQSHTCQICLDSMPTLYNLNEHVRKLHKNHAYPVMQFGNISAFHCNYCPEMFADINSLQEHIRVSHCGPNANPSDGNNAFFCNQCSMGFLTESSLTEHIQQAHCSVGSAKLESPVVQPTQSFMEVYSCPYCTNSPIFGSILKLTKHIKENHKNIPLAHSKKSKAEQSPVSSDVEVSSPKRQRLSASANSISNGEYPCNQCDLKFSNFESFQTHLKLHLELLLRKQACPQCKEDFDSQESLLQHLTVHYMTTSTHYVCESCDKQFSSVDDLQKHLLDMHTFVLYHCTLCQEVFDSKVSIQVHLAVKHSNEKKMYRCTACNWDFRKEADLQVHVKHSHLGNPAKAHKCIFCGETFSTEVELQCHITTHSKKYNCKFCSKAFHAIILLEKHLREKHCVFDAATENGTANGVPPMATKKAEPADLQGMLLKNPEAPNSHEASEDDVDASEPMYGCDICGAAYTMEVLLQNHRLRDHNIRPGEDDGSRKKAEFIKGSHKCNVCSRTFFSENGLREHLQTHRGPAKHYMCPICGERFPSLLTLTEHKVTHSKSLDTGTCRICKMPLQSEEEFIEHCQMHPDLRNSLTGFRCVVCMQTVTSTLELKIHGTFHMQKLAGSSAASSPNGQGLQKLYKCALCLKEFRSKQDLVKLDVNGLPYGLCAGCMARSANGQVGGLAPPEPADRPCAGLRCPECSVKFESAEDLESHMQVDHRDLTPETSGPRKGTQTSPVPRKKTYQCIKCQMTFENEREIQIHVANHMIEEGINHECKLCNQMFDSPAKLLCHLIEHSFEGMGGTFKCPVCFTVFVQANKLQQHIFAVHGQEDKIYDCSQCPQKFFFQTELQNHTMSQHAQ

SEQ ID NO: 16154 - protein, 752 aa, Homo Sapiens
MAEPASVTVTFDDVALYFSEQEWEILEKWQKQMYKQEMKTNYETLDSLGYAFSKPDLITWMEQGRMLLISEQGCLDKTRRTTSPPTDEQLNMKNTGKLLCFDDEGTPRTKEEDCRLNGPQKQDLCAALRGKERKILLAQTATFQSPSLRETEILNKKVSITAYDPDKKDLRHKPRETPGRLEIPTGPRCYSCYVCRKVFQVRRDLLKHKRSHSKSQLCRYPKYKNSSRGKSELRRTQRLLCQKKRFQCSECEKSYFLKGSLVTHQVVHTGQRPYPCPECDKTFRYRANLKKHLCLHRGERPFCCGECGRAFVQQCELTEHLRLHSGEKPFQCPQCDRCFRLKRGMKVHLTQHSGKRPFHCPECGRSFSRKAALKTHQRTHSEEKPFSCGECGRKFIYKIKLDEHIRVHTGEKPFSCPECNKSFRLKRSLKAHGLQHIGKRPFQCPECSRGFFWRNAMRAHQRLHSEQKPFPCAECGKRFTRPSKLACHTRVHDRQKEFPCGECKKTFSQQSRLTQHLKVHTTEKPFSCAECGRSFRRRAHLTEHTRLHSGEEPFQCPECDKSFSWKASMKFHQRMHRDEKPFACGECDKTYTHQSQLTEHLRLHSGEKPYQCPECEKTFRLKGNLKSHLLQHSGQKPFSCVMCGKSFTQQYRLTEHIRVHSGEKPFQCPECDKSYCIRGSLKVHLYKHSGERPFQCPECGKGFLQKRSLKAHLCLHSGERPFSCDECGRSFTYVGALKTHIAVHAKEKPSSL

SEQ ID NO: 16155 - protein, 554 aa, Homo Sapiens
MAAADLSHGHYLSGDPVCLHEEKTPAGRIVADCLTDCYQDSVTFDDVAVDFTQEEWTLLDSTQRSLYSDVMLENYKNLATVGGQIIKPSLISWLEQEESRTVQGGVLQGWEMRLETQWSILQQDFLRGQTSIGIQLEGKHNGRELCDCEQCGEVFSEHSCLKTHVRTQSTGNTHDCNQYGKDFLTLCEKTSTGEKLSEFNQSEKIFSLTPNIVYQRTSTQEKSFECSHCGKSFINESYLQAHMRTHNGEKLYEWRNYGPGFIDSTSLSVLIETLNAKKPYKCKECGKGYRYPAYLSIHMRTHTGEKPYECKECGKAFNYSNSFQIHGRTHTGEKPYVCKECGKAFTQYSGLSMHVRSHSGDKPYECKECGKSFLTSSRLIQHIRTHTGEKPFVCVECGKAFAVSSNLSGHLRTHTEEKACECKICGKVFGYPSCLNNHMRTHSAQKPYTCKECGKAFNYSTHLKIHMRIHTGEKPYECKQCGKAFSHSSSFQIHERTHTGEKPYECKECGKAFTCSSSFRIHEKTHTEEKPYKCQQCGKAYSHPRSLRRHEQIH

SEQ ID NO: 16156 - protein, 188 aa, Homo Sapiens
MTETREPAETGGYASLEEDDEDLSPGPEHSSDSEYTLSEPDSEEEEDEEEEEEETTDDPEYDPGYKVKQRLGGGRGGPSRRAPRAAQPPAQPCQLCGRSPLGEAPPGTPPCRLCCPATAPQEAPAPEGRALGEEEEEPPRAGEGRPAGREEEEEEEEEGTYHCTECEDSFDNLGELHGHFMLHARGEV

SEQ ID NO: 16157 - protein, 674 aa, Homo Sapiens
MGPLTFTDVAIEFSLEEWQCLDTAQQNLYRNVMLENYRNLVFLGIAVSKPDLITCLEKEKEPCKMKRHEMVDEPPVVCSHFAEDFWPEQDIKDSFQKVTLRRYDKRGHENLQLRKGYKTVGDCKLYKGGYNGLNQCLTLTQSKMYHCDIYVKVFYAFSNADRYKTRHTGKKPFQCKKCGKSFCMLSQLTQHKKIHIRENTYRCKEFGNAFNQSSALTNHKRIYVGEKHYRCEECGKAFNHYSTLTNHKRIHTGEKPYKCKECGKAFSRYSTLTTHKRIHSGEKPYKCDECGKTFSISSTFTKHKIIHTEEKPYKCKECGKAFNRSSTLTSHKRIHTGEKPYKCEECGKAFNWSSTLTKHKVIHTGEKPYKCEECGKAFNQSSRLTRHKKIHTGEEPYKFEKCGRVFTCSSTLTQDKKIHTGEKPYNCEECGKVFTYSSTLTRHKRIHTEEKPYKCNECGKAFNRSSHLTSHRRIHTGEKPYKCEECGKAFKQSSNLNSHKKIHSGEKPYKCEECGKAFILSSRLTQHKKIHTGEKPYKCEECGKAFNRSSRLTQHKKIHTGEKPYKCKQCDKAFTHSSNLSSHKKIHSGEKPYKCEECGKAFNRSSRLTQHKKIHTREKPYKCEECAKAFTRSSRLTQHKKIHRMGVVAHACNPSTLGGRGGRITRSGDRDRPG

SEQ ID NO: 16158 - protein, 809 aa, Homo Sapiens
MGPLTFMDVAIEFCLEEWQCLDIAQQNLYRNVMLENYRNLVFLGIAVSKPDLITCLEQEKEPWEPMRRHEMVAKPPVMCSHFTQDFWPEQHIKDPFQKATLRRYKNCEHKNVHLKKDHKSVDECKVHRGGYNGFNQCLPATQSKIFLFDKCVKAFHKFSNSNRHKISHTEKKLFKCKECGKSFCMLPHLAQHKIIHTRVNFCKCEKCGKAFNCPSIITKHKRINTGEKPYTCEECGKVFNWSSRLTTHKKNYTRYKLYKCEECGKAFNKSSILTTHKIIRTGEKFYKCKECAKAFNQSSNLTEHKKIHPGEKPYKCEECGKAFNWPSTLTKHKRIHTGEKPYTCEECGKAFNQFSNLTTHKRIHTAEKFYKCTECGEAFSRSSNLTKHKKIHTEKKPYKCEECGKAFKWSSKLTEHKLTHTGEKPYKCEECGKAFNWPSTLTKHNRIHTGEKPYKCEVCGKAFNQFSNLTTHKRIHTAEKPYKCEECGKAFSRSSNLTKHKKIHIEKKPYKCEECGKAFKWSSKLTEHKITHTGEKPYKCEECGKAFNHFSILTKHKRIHTGEKPYKCEECGKAFTQSSNLTTHKKIHTGEKFYKCEECGKAFTQSSNLTTHKKIHTGGKPYKCEECGKAFNQFSTLTKHKIIHTEEKPYKCEECGKAFKWSSTLTKHKIIHTGEKPYKCEECGKAFKLSSTLSTHKIIHTGEKPYKCEKCGKAFNRSSNLIEHKKIHTGEQPYKCEECGKAFNYSSHLNTHKRIHTKEQPYKCKECGKAFNQYSNLTTHNKIHTGEKLYKPEDVTVILTTPQTFSNIK

SEQ ID NO: 16159 - protein, 570 aa, Homo Sapiens
MENLKSGVYPLKEASGCPGADRNLLVYSFYEKGPLTFRDVAIEFSLEEWQCLDTAQQDLYRKVMLENYRNLVFLAGIAVSKPDLITCLEQGKEPWNMKRHAMVDQPPVTYSHFAQDLWPEQGIKDSFQEVILRRYGKCGHEDLQLRTGCKSVDECNLHKECYDELNQCLTTTQSEIFQYDKYVNVFYKFSNPNIQKIRHTGKKPFKCKKCDKSFCMLLHLTQHKRIHIRENSYQCEECGKVFNWFSTLTRHRRIHTGEKPYKCEQCGKAFKQSSTLTTHKIIHTGEKPYRCEECGKTFNRSSHLTTHKRIHTGEKPYRCEECGRAFNRSSHLTTHKIIHTGEKPYKCEECGKAFNQSSTLTTHKIIHAGEKPYKCEECGKAFYRFSYLTKHKIIHTGEKFYKCEECGKGFNWSSTLTKHKRIHTGEKPYKCEQCGKAFNESSNLTAHKIIHTGEKPYKCEECGKAFNRSPKLTAHKVIHSGEKPYKCEECGKAFNQFSNLTKHKITHIGDTSYKYLECDKAFSQSSTLTKHKVIHTGEKPYNCEEYGKAFNQSSNLIEQSNSYWRETLQM

SEQ ID NO: 16160 - protein, 576 aa, Homo Sapiens
MDDLKYGVYPLKEASGCPGAERNLLVYSYFEKETLTFRDVAIEFSLEEWECLNPAQQNLYMNVMLENYKNLVFLGVAVSKQDPVTCLEQEKEPWNMKRHEMVDEPPAMCSYFTKDLWPEQDIKDSFQQVILRRYGKCEHENLQLRKGSASVDEYKVHKEGYNELNQCLTTTQSKIFPCDKYVKVFHKFLNANRHKTRHTGKKPFKCKKCGKSFCMLLHLSQHKRIHIRENSYQCEECGKAFKWFSTLTRHKRIHTGEKPFKCEECGKAFKQSSTLTTHKIIHTGEKPYRCEECGKAFNRSSHLTTHKIIHTGEKPYKCEECGKAFNQSSTLSTHKFIHAGEKPYKCEECDKAFNRFSYLTKHKIIHTGEKSYKCEECGKGFNWSSTLTKHKRIHTGEKPYKCEVCGKAFNESSNLTTHKMIHTGEKPYKCEECGKAFNRSPQLTAHKIIHTGEKPYKCEECGKAFSQSSILTTHKRIHTGEKPYKCEECGKAFNRSSNLTKHKIIHTGEKSYKCEECGKAFNQSSTLTKHRKIHTRQKPYNCEECDNTFNQSSNLIKQNNSYWRETLQMSRMWESL

SEQ ID NO: 16161 - protein, 652 aa, Homo Sapiens
MINAQELLTLEDVTVEFTWEEWQLLGPFQKDLYRDVMLEIYSNLLSMGYQVSKPDALSKLERGEEPWTMEDERHSRICPENNEVDDHLQDHLENQRMLKSVEQYHEHNAFGNTASQTKSLCLFRENHDTFELYIKTLKSNLSLVNQNKSCEINNSTKFSGDGKSFLHGNYEELYSAAKFSVSTKANSTKSQVSKHQRTHEIEKNHVCSECGKAFVKKSQLTDHERVHTGEKPYGCTLCAKVFSRKSRLNEHQRIHKREKSFICSECGKVFTMKSRLIEHQRTHTGEKPYICNECGKGFPGKRNLIVHQRNHTGEKSYICSECGKGFTGKSMLIIHQRTHTGEKPYICSECGKGFTTKHYVIIHQRNHTGEKPYICNECGKGFTMKSRMIEHQRTHTGEKPYICSECGKGFPRKSNLIVHQRNHTVEKSYLCSECGKGFTVKSMLIIHQRTHTGEKPYTCSECGKGFPLKSRLIVHQRTHTGEKPYRCSECGKGFIVNSGLMLHQRTHTGEKPYICNECGKGFAFKSNLVVHQRTHTGEKPFMCSECGKGFTMKRYLIVHQQIHTEEKSCICSECGRGFAKETELALHKQVHTGEKPYGCNECGKGFTMKSRLIVHQRTHTGEKPFVCSECRKAFSSKRNLIVHQRTHNGNKP

SEQ ID NO: 16162 - protein, 673 aa, Homo Sapiens; identical to SEQ ID NO: 14432

SEQ ID NO: 16163 - protein, 470 aa, Homo Sapiens
MAATLLMAGSQAPVTFEDMAMYLTREEWRPLDAAQRDLYRDVMQENYGNVVSLDFEIRSENEVNPKQEISEDVQFGTTSERPAENAEENPESEEGFESGDRSERQWGDLTAEEWVSYPLQPVTDLLVHKEVHTGIRYHICSHCGKAFSQISDLNRHQKTHTGDRPYKCYECGKGFSRSSHLIQHQRTHTGERPYDCNECGKSFGRSSHLIQHQTIHTGEKPHKCNECGKSFCRLSHLIQHQRTHSGEKPYECEECGKSFSRSSHLAQHQRTHTGEKPYECNECGRGFSERSDLIKHYRVHTGERPYKCDECGKNFSQNSDLVRHRRAHTGEKPYHCNECGENFSRISHLVQHQRTHTGEKPYECNACGKSFSRSSHLITHQKIHTGEKPYECNECWRSFGERSDLIKHQRTHTGEKPYECVQCGKGFTQSSNLITHQRVHTGEKPYECTECEKSFSRSSALIKHKRVHTD

SEQ ID NO: 16164 - protein, 828 aa, Homo Sapiens
MQNSVSVPPKDEGESNIPSGTIQSRKGLQNKSQFRTIAPKIVPKVLTSRMLPCHSPSRSDQVNLGPSINSKLLGMSTQNYALMQVAGQEGTFSLVALPHVASAQPIQKPRMSLPENLKLPIPRYQPPRNSKASRKKPILIFPKSGCSKAPAQTQMCPQMSPSPPHHPELLYKPSPFEEVPSLEQAPASISTAALTNGSDHGDLRPPVTNTHGSLNPPATPASSTPEEPAKQDLTALSGKAHFVSKITSSKPSAVASEKFKEQVDLAKTMTNLSPTILGNAVQLISSVPKGKLPIPPYSRMKTMEVYKIKSDANIAGFSLPGPKADCDKIPSTTEGFNAATKVASRLPVPQVSQQSACESAFCPPTKLDLNHKTKLNSGAAKRKGRKRKVPDEILAFQGKRRKYIINKCRDGKERVKNDPQEFRDQKLGTLKKYRSIMPKPIMVIPTLASLASPTTLQSQMLGGLGQDVLLNNSLTPKYLGCKQDNSSSPKPSSVFRNGFSGIKKPWHRCHVCNHHFQFKQHLRDHMNTHTNRRPYSCRICRKSYVRPGSLSTHMKLHHGENRLKKLMCCEFCAKVFGHIRVYFGHLKEVHRVVISTEPAPSELQPGDIPKNRDMSVRGMEGSLERENKSNLEEDFLLNQADEVKLQIKCGRCQITAQSFAEIKFHLLDVHGEEIEGRLQEGTFPGSKGTQEELVQHASPDWKRHPERGKPEKVHSSSEESHACPRLKRQLHLHQNGVEMLMENEGPQSGTNKPRETCQGPECPGLHTFLLWSHSGFNCLLCAEMLGRKEDLLHHWKHQHNCEDPSKLWAILNTVSNQGVIELSSEAEK

SEQ ID NO: 16165 - protein, 499 aa, Homo Sapiens
MLSLSPILLYTCEMFQDPVAFKDVAVNFTQEEWALLDISQKNLYREVMLETFWNLTSIGKKWKDQNIEYEYQNPRRNFRSVTEEKVNEIKEDSHCGETFTPVPDDRLNFQKKKASPEVKSCDSFVCEVGLGNSSSNMNIRGDTGHKACECQEYGPKPWKSQQPKKAFRYHPSLRTQERDHTGKKPYACKECGKNIIYHSSIQRHMVVHSGDGPYKCKFCGKAFHCLSLYLIHERTHTGEKPYECKQCGKSFSYSATHRIHERTHIGEKPYECQECGKAFHSPRSCHRHERSHMGEKAYQCKECGKAFMCPRYVRRHERTHSRKKLYECKQCGKALSSLTSFQTHIRMHSGERPYECKTCGKGFYSAKSFQRHEKTHSGEKPYKCKQCGKAFTRSGSFRYHERTHTGEKPYECKQCGKAFRSAPNLQLHGRTHTGEKPYQCKECGKAFRSASQLRIHRRIHTGEKPYECKKCGKAFRYVQNFRFHERTQTHKNALWRKTL

SEQ ID NO: 16166 - protein, 663 aa, Homo Sapiens
MALCYGTFWGYPKMLEAANLMEGLVDIGPWVTLPRGQPEVLEWGLPKDQDSVAFEDVAVNFTHEEWALLGPSQKNLYRDVMRETIRNLNCIGMKWENQNIDDQHQNLRRNPRCDVVERFGKSKDGSQCGETLSQIRNSIVNKNTPARVDACGSSVNGEVIMGHSSLNCYIRVDTGHKHRECHEYAEKSYTHKQCGKGLSYRHSFQTCERPHTGKKPYDCKECGKTFSSPGNLRRHMVVKGGDGPYKCELCGKAFFWPSLLRMHERTHTGEKPYECKQCSKAFPVYSSYLRHEKIHTGEKPYECKQCSKAFPDYSSYLRHERTHTGEKPYKCKQCGKAFSVSGSLRVHERIHTGEKPYTCKQCGKAFCHLGSFQRHMIMHSGDGPHKCKICGKGFDFPGSARIHEGTHTLEKPYECKQCGKLLSHRSSFRRHMMAHTGDGPHKCTVCGKAFDSPSVFQRHERTHTGEKPYECKQCGKAFRTSSSLRKHETTHTGEQPYKCKCGKAFSDLFSFQSHETTHSEEEPYECKECGKAFSSFKYFCRHERTHSEEKSYECQICGKAFSRFSYLKTHERTHTAEKPYECKQCRKAFFWPSFLLRHERTHTGERPYECKHCGKAFSRSSFCREHERTHTGEKPYECKECGKAFSSLSSFNRHKRTHWKDIL

SEQ ID NO: 16167 - protein, 595 aa, Homo Sapiens
MDPVAFKDVAVNFTQEEWALLDISQRKLYREVMLETFRNLTSLGKRWKDQNIEYEHQNPRRNFRSLIEEKVNEIKDDSHCGETFTPVPDDRLNFQEKKASPEVKSCESFVCGEVGLGNSSFNMNIRGDIGHKAYEYQEYGPKPCKCQQPKKAFRYRPSFRTQERDHTGEKPNACKVCGKTFISHSSVRRHMVMHSGDGPYKCKFCGKAFHCLRLYLIHERIHTGEKPCECKQCGKSFSYSATHRIHKRTHTGEKPYEYQECGKAFHSPRSYRRHERIHMGEKAYQCKECGKAFTCPRYVRIHERTHSRKNLYECKQCGKALSSLTSFQTHVRLHSGERPYECKICGKDFCSVNSFQRHEKIHSGEKPYKCKQCGKAFPHSSSLRYHERTHTGEKPYECKQCGKAFRSASHLRVHGRTHTGEKPYECKECGKAFRYVNNLQSHERTQTHIRIHSGERRYKCKICGKGFYCPKSFQRHEKTHTGEKLYECKQRSVVPSVVPVPFDIMKGLTLERSPINASNVGKPSELCQSFECMVGLTLKRNPMSVSNDGKPSDLPHTFEYVVGHTMERSPMHVRNVGNPSDLPRTFEFMKGHKHT

SEQ ID NO: 16168 - protein, 693 aa, Homo Sapiens
MDSVAFEDVAINFTCEEWALLGPSQKSLYRDVMQETIRNLDCIGMIWQNHDIEEDQYKDLRRNLRCHMVERACEIKDNSQCGGPFTQTQDSIVNEKIPGVDPWESSECTDVLMGRSSLNCYVRVDSEHKPCEYQEYGEKPYTHTQCGTAFSYQPCFQIHERPQHGKKLYDCKECASFSSLENLQRHMAAHHGDGPRICKLCGNAFIWPSLFHMLRRTHTEEKPYEYEQCSTAFPAYSSTLRHERTHSGEKPYQCKQCGKAFSCSCYTQLYERTHTGEQSYECKQCGKAFYHLGSFQRHMIVHTGDGPHKCKICGKGFLSPSSVRRHKRTHTGEKPYECKYCGKAFSDCTGFRRHMITHTGDGPHKCKVCGKAFDSPSLCRRHETTHTGEKPYKCECGKAFSDFYYFRNHETTHTGEKPYKCKQCGKAFICCTYLQIHERIHTGERPYKCKQCGKAFRSSNYIRVHEKTHTGEKPYECKQCGKALSHLKSFQRHMIMHTGDGPHKCKICGKSFDSPSSFRRHERIHTGERPYKCKLCGKGFRSSSYIQLHERTHTGEKPYGCQQCGKALSDLSSFRRHMITHTGNGPHKCKICGKGFDYPSSVQRHERTHTGEKPYECKECGKAFSHSSYLRIHERVHTGEKPYKCKECGKPFHCPSAFHKHERTHSMEKPYKCKECGEAFHCISSFHKHEMTH

SEQ ID NO: 16169 - protein, 627 aa, Homo Sapiens
MIVFGGEDRSDLFLPDSQTNEERKQYDSVAFEDVAVNFTQEEWALLGPSQKSLYRDVMWETIRNLDCIGMKWEDTNIEDQHRNPRRSLRCHIIERFSESRQPDSTVNEKPPGVDPCKSSVCGEIMGCSFLNCYITFDAGHKPDECQEYGEKPHTHKQCGTAFNYHHSFQTQERPHTGKKRYDCKECGKTFSSSGNLRRHIIVQRGGGPYICKLCGKAFFWPSLFRMHERTHTGEKPYECKQCCKAFPIYSSYLRHERTHTGEKPYECKHCSKAFPDYSSYVRHERTHTGEKPYKCKRCGRAFSVSSSLRIHERTHTGEKPYECKQCGKAFHHLGSFQRHMIRHTGDGPHKCKICGKGFDCPSSLQSHERTHTGEKPYECKQCGKALSHHSSFRSHMIMHTGDGPHKCKVCGKAFIYPSVFQGHERTHTGEKPYECKECGKAFRISSSLRRHETTHTGEKPYKCKCGKAFIDFYSFQNHETTHTGEKPYECKECGKAFSCFTYLSQHRRTHMAEKPYECKTCKKAFSHFGNLKVHERIHTGEKPYECKECRKAFSWLTCLLRHERIHTGKKSYECQQCGKAFTRSRFLRGHEKTHTGEKMHECKECGKALSSLSSLHRHKRTHWRDTL

SEQ ID NO: 16170 - protein, 671 aa, Homo Sapiens
MASVALEDVAVNFTREEWALLGPCQKNLYKDVMQETIRNLDCVVMKWKDQNIEDQYRYPRKNLRCRMLERFVESKDGTQCGETSSQIQDSIVTKNTLPGVGPCESSMRGEKVMGHSSLNCYIRVGAGHKPHEYHECGEKPDTHKQRGKAFSYHNSFQTHERLHTGKKPYDCKECGKSFSSLGNLQRHMAVQRGDGPYKCKLCGKAFFWPSLLHMHERTHTGEKPYECKQCSKAFSFYSSYLRHERTHTGEKPYECKQCSKAFPFYSSYLRHERTHTGEKPYKCKQCSKAFPDSSSCLIHERTHTGEKPYTCKQCGKAFSVSGSLQRHETTHSAEKPYACQQCGKAFHHLGSFQRHMIRHTGNGPHKCKICGKGFDCPSSLQSHERTHTGEKPYECKQCGKALSHRSSFRSHMIMHTGDGPHKCKVCGKAFVYPSVFQRHERTHTAEKPYKCKQCGKAYRISSSLRRHETTHTGEKPYKCKLGKACIDFCSFQNHKTTHTGEKPYECKECGKAFSRFRYLSRHKRTHTGEKPYECKTCRKAFGHYDNLKVHERIHSGEKPYECKECGKAFSWLTCFLRHERIHMREKSYECPQCGKAFTHSRFLQGHEKTHTGENPYECKECGKAFASLSSLHRHKKTHWKKTHTGENPYECKECGKAFASLSSLHRHKKTH

SEQ ID NO: 16171 - protein, 327 aa, Homo Sapiens
MEVAVPVKQEAEGLALDSPWHRFRRFHLGDAPGPREALGLLRALCRDWLRPEVHTKEQMLELLVLEQFLSALPADTQAWVCSRQPQSGEEAVALLEELWGPAASPDGSSATRVPQDVTQGPGATGGKEDSGMIPLAGTAPGAEGPAPGDSQAVRPYKQEPSSPPLAPGLPAFLAAPGTTSCPECGKTSLKPAHLLRHRQSHSGEKPHACPECGKAFRRKEHLRRHRDTHPGSPGSPGPALRPLPAREKPHACCECGKTFYWREHLVRHRKTHSGARPFACWECGKGFGRREHVLRHQRIHGRAAASAQGAVAPGPDGGGPFPPWPLG

SEQ ID NO: 16172 - protein, 1031 aa, Homo Sapiens
MPPGRWHAAYPAQAQSSRERGRLQTVKKEEEDESYTPVQAARPQTLNRPGQELFRQLFRQLRYHESSGPLETLSRLRELCRWWLRPDVLSKAQILELLVLEQFLSILPGELRVWVQLHNPESGEEAVALLEELQRDLDGTSWRDPGPAQSPDVHWMGTGALRSAQIWSLASPLRSSSALGDHLEPPYEIEARDFLAGQSDTPAAQMPALFPREGCPGDQVTPTRSLTAQLQETMTFKDVEVTFSQDEWGWLDSAQRNLYRDVMLENYRNMASLVGPFTKPALISWLEAREPWGLNMQAAQPKGNPVAAPTGDDLQSKTNKFILNQEPLEEAETLAVSSGCPATSVSEGIGLRESFQQKSRQKDQCENPIQVRVKKEETNFSHRTGKDSEVSGSNSLDLKHVTYLRVSGRKESLKHGCGKHFRMSSHHYDYKKYGKGLRHMIGGFSLHQRIHSGLKGNKKDVCGKDFSLSSHHQRGQSLHTVGVSFKCSDCGRTFSHSSHLAYHQRLHTQEKAFKCRVCGKAFRWSSNCARHEKIHTGVKPYKCDLCEKAFRRLSAYRLHRETHAKKKFLELNQYRAALTYSSGFDHHLGDQSGEKLFDCSQCRKSFHCKSYVLEHQRIHTQEKPYKCTKCRKTFRWRSNFTRHMRLHEEEKFYKQDECREGFRQSPDCSQPQGAPAVEKTFLCQQCGKTFTRKKTLVDHQRIHTGEKPYQCSDCGKDFAYRSAFIVHKKKHAMKRKPEGGPSFSQDTVFQVPQSSHSKEEPYKCSQCGKAFRNHSFLLIHQRVHTGEKPYKCRECGKAFRWSSNLYRHQRIHSLQKQYDCHESEKTPNVEPKILTGEKRFWCQECGKTFTRKRTLLDHKGIHSGEKRYKCNLCGKSYDRNYRLVNHQRIHSTERPFKCQWCGKEFIGRHTLSSHQRKHTRAAQAERSPPARSSSQDTKLRLQKLKPSEEMPLEDCKEACSQSSRLTGLQDISIGKKCHKCSICGKTFNKSSQLISHKRFHTRERPFKCSKCGKTFRWSSNLARHMKNHIRD

SEQ ID NO: 16173 - protein, 450 aa, Homo Sapiens
MPSPLGPPCLPVMDPETTLEEPETARLRFRGFCYQEVAGPREALARLRELCCQWLQPEAHSKEQMLEMLVLEQFLGTLPPEIQAWVRGQRPGSPEEAAALVEGLQHDPGQLLGWITAHVLKQEVLPAAQKTEEPLGSPHPSGTVESPGEGPQDTRIEGSVQLSCSVKEEPNVDGQEVAPSSPPLAAQSPEGNHGHQEPASTSFHPPRIQEEWGLLDRSQKELYWDAMLEKYGTVVSLGLPPHQPEAQAQSELGMLLTGTGVCRSLRSGNESEGPPGCPEAQPPQGPGPAAWEGLSGAATPAPTVRPGTPPVPTQPTPAETRLEPAATPRKPYTCEQCGRGFDWKSVFVIHHRTHTSGPGVQSPGLATGESTEKPPQGEVAFPHHPRRSLTGPRSYPCEECGCSFSWKSQLVIHRKSHTGQRRHFCSDCGRAFDWKSQLVIHRKGHRPEVP

SEQ ID NO: 16174 - protein, 518 aa, Homo Sapiens; identical to SEQ ID NO: 14436

SEQ ID NO: 16175 - protein, 682 aa, Homo Sapiens
MTKSKEAVTFKDVAVVFSEEELQLLDLAQRKLYRDVMLENFRNVVSVGHQSTPDGLPQLEREEKLWMMKMATQRDNSSGAKNLKEMETLQEVGLRYLPHEELFCSQIWQQITRELIKYQDSVVNIQRTGCQLEKRDDLHYKDEGFSNQSSHLQVHRVHTGEKPYKGEHCVKSFSWSSHLQINQRAHAGEKPYKCEKCDNAFRRFSSLQAHQRVHSRAKSYTNDASYRSFSQRSHLPHHQRVPTGENPYKYEECGRNVGKSSHCQAPLIVHTGEKPYKCEECGVGFSQRSYLQVHLKVHTGKKPYKCEECGKSFSWRSRLQAHERIHTGEKPYKCNACGKSFSYSSHLNIHCRIHTGEKPYKCEECGKGFSVGSHLQAHQISHTGEKPYKCEECGKGFCRASNLLDHQRGHTGEKPYQCDACGKGFSRSSDFNIHFRVHTGEKPYKCEECGKGFSQASNLLAHQRGHTGEKPYKCGTCGKGFSRSSDLNVHCRIHTGEKPYKCERCGKAFSQFSSLQVHQRVHTGEKPYQCAECGKGFSVGSQLQAHQRCHTGEKPYQCEECGKGFCRASNFLAHRGVHTGEKPYRCDVCGKRFRQRSYLQAHQRVHTGERPYKCEECGKVFSWSSYLQAHQRVHTGEKPYKCEECGKGFSWSSSLIIHQRVHADDEGDKDFPSSEDSHRKTR

SEQ ID NO: 16176 - protein, 1061 aa, Homo Sapiens
MGDPGSEIIESVPPAGPEASESTTDENEDDIQFVSEGPLRPVLEYIDLVSSDDEEPSTSYTDENIKRKDHIDYQKDKVALTLARLARHVEVEKQQKEEKNRAFREKIDFQHAHGLQELEFIRGHSDTEAARLCVDQWLKMPGLKTGTINCGTKSSFRRGGHTWVSGKPILCPIMHCNKEFDNGHLLLGHLKRFDHSPCDPTITLHGPFFSSFACVVCYKKFVTQQQYRDHLFDKEATDDGHNNNLLPQIIQCFACPNCFLLFSRKEECSKHMSGKNHFHQSFKLGDNKGIAHPISFPSFAKKLLISLCKDVPFQVKCVACHKTLRSHMELTAHFRVHCRNAGPVAVAEKSITQVAEKFILRGYCPDCNQVFVDETSTQNHKQNSGHKVRVINSVEESVLLYCHSSEGNKDPSSDLHLLLDQSKFSSLKRTMSIKESSSLECIAIPKKKMNLKDKSHEGVACVQKEKSVVKTWFCECNQRFPSEDAVEKHVFSANTMGYKCVVCGKVCDDSGVIRLHMSRIHGGAHLNNFLFWCRTCKKELTRKDTIMAHVTEFHNGHRYFYEMDEVEGETLPSSSTTLDNLTANKPSSAITVIDHSPANSSPRGKWQCRICEDMFDSQEYVKQHCMSLASHKFHRYSCAHCRKPFHKIETLYRHCQDEHDNEIKIKYFCGLCDLIFNVEEAFLSHYEEHHSIDYVFVSEKTETSIKTEDDFPVIETSNQLTCGCRESYICKVNRKEDYSRCLQIMLDKGKLWFRCSLCSATAQNLTDMNTHIHQVHKEKSDEEEQQYVIKCGTCTKAFHDPESAQQHFHRKHCFLQKPSVAHFGSEKSNLYKFTASASHTERKLKQAINYSKSLDMEKGVENDLSYQNIEEEIVELPDLDYLRTMTHIVFVDFDNWSNFFGHLPGHLNQGTFIWGFQGGNTNWKPPLNCKIYNYLNRIGCFFLHPRCSKRKDAADFAICMHAGRLDEQLPKQIPFTILSGDQGFLELENQFKKTQRPAHILNPHHLEGDMMCALLNSISDTTKECDSDDNMGAKNTSIGEEFISTEDVELEEAIRRSLEEM

SEQ ID NO: 16177 - protein, 522 aa, Homo Sapiens
MAVSHLPTMVQESVTFKDVAILFTQEEWGQLSPAQRALYRDVMLENYSNLVSLGLLGPKPDTFSQLEKREVWMPEDTPGGFCLDWMTMPASKKSTVKAEIPEEELDQWTIKERFSSSSHWKCASLLEWQCGGQEISLQRVVLTHPNTPSQECDESGSTMSSSLHSDQSQGFQPSKNAFECSECGKVFSKSSTLNKHQKIHNEKNANQKIHIKEKRYECRECGKAFHQSTHLIHHQRIHTGEKPYECKECGKAFSVSSSLTYHQKIHTGEKPFECNLCGKAFIRNIHLAHHHRIHTGEKPFKCNICEKAFVCRAHLTKHQNIHSGEKPYKCNECGKAFNQSTSFLQHQRIHTGEKPFECNECGKAFRVNSSLTEHQRIHTGEKPYKCNECGKAFRDNSSFARHRKIHTGEKPYRCGLCEKAFRDQSALAQHQRIHTGEKPYTCNICEKAFSDHSALTQHKRIHTREKPYKCKICEKAFIRSTHLTQHQRIHTGEKPYKCNKCGKAFNQTANLIQHQRHHIGEK

SEQ ID NO: 16178 - protein, 562 aa, Homo Sapiens
MAAAWMAPAQESVTFEDVAVTFTQEEWGQLDVTQRALYVEVMLETCGLLVALGDSTKPETVEPIPSHLALPEEVSLQEQLAQGVPRYSYLGQAMDQDGPSEMQEYFLRPGTDPQSEKLHGKMSLEHEGLATADGICSMMIQNQVSPEDALYGFDSYGPVTDSLIHEGENSYKFEEMFNENCFLVQHEQILPRVKPYDCPECGKAFGKSKHLLQHHIIHTGEKPYKCLECGKDFNRRSHLTRHQRTHNGDKPFVCSECGRTFNRGSHLTRHQRVHSGEKPFVCNECGKAFTYRSNFVLHNKSHNEKKPFACSECGKGFYESTALIQHFIIHTGERPFKCLECGKAFNCRSHLKQHERIHTGEKPFVCSQCGKAFTHYSTYVLHERAHTGEKPFECKECGKAFSIRKDLIRHFNIHTGEKPYECLQCGKAFTRMSGLTRHQWIHTGEKPYVCIQCGKAFCRTTNLIRHFSIHTGEKPYECVECGKAFNRRSPLTRHQRIHTAEKSHEPIQSGNVSCESTDLIQHSIIHTESSPVSAVNMETPSIAAHSSSLDINGFIVEETLPL

SEQ ID NO: 16179 - protein, 563 aa, Homo Sapiens
MAHELVMFRDVAIDVSQEEWECLNPAQRNLYKEVMLENYSNLVSLGLSVSKPAVISSLEQGKEPWMVVREETGRWCPGTWKTWGFHNNFLDNNEATDINADLASRDEPQKLSPKRDIYETELSQWVNMEEFKSHSPERSIFSAIWEGNCHFEQHQGQEEGYFRQLMINHENMPIFSQHTLLTQEFYDREKISECKKCRKIFSYHLFFSHHKRTHSKELSECKECTEIVNTPCLFKQQTIQNGDKCNECKECWKAFVHCSQLKHLRIHNGEKRYECNECGKAFNYGSELTLHQRIHTGEKPYECKECGKAFRQRSQLTQHQRLHTGEKPYECKQCGKAFIRGFQLTEHLRLHTGEKPYECKECGKTFRHRSHLTIHQRIHTGEKPYECRECGKAFSYHSSFSHHQKIHSGKKPYECHECGKAFCDGLQLTLHQRIHTGEKPYECKECGKTFRQCSHLKRHQRIHTGEKPHECMICGKAFRLHSHLIQHQRIHTGEKPYECKECGKAFSYHSSFSHHQRIHSGKKPYQCGKAFNHRLQLNLHQTLHTGEKPVRFPLLPPHPSLAS

SEQ ID NO: 16180 - protein, 2506 aa, Homo Sapiens
MEVLQCDGCDFRAPSYEDLKAHIQDVHTAFLQPTDVAEDNVNELRCGSVNASNQTEVEFSSIKDEFAIAEDLSGQNATSLGTGGYYGHSPGYYGQHIAANPKPTNKFFQCKFCVRYFRSKNLLIEHTRKVHGAQAEGSSSGPPVPGSLNYNIMMHEGFGKVFSCQFCTYKSPRRARIIKHQKMYHKNNLKETTAPPPAPAPMPDPVVPPVSLQDPCKELPAEVVERSILESMVKPLTKSRGNFCCEWCSYQTPRRERWCDHMMKKHRSMVKILSSLRQQQEGTNLPDVPNKSAPSPTSNSTYLTMNAASREIPNTTVSNFRGSMGNSIMRPNSSASKFSPMSYPQMKPKSPHNSGLVNLTERSRYGMTDMTNSSADLETNSMLNDSSSDEELNEIDSENGLSAMDHQTSGLSAEQLMGSDGNKLLETKGIPFRRFMNRFQCPFCPFLTMHRRSISRHIENIHLSGKTAVYKCDECPFTCKSSLKLGAHKQCHTGTTSDWDAVNSQSESISSSLNEGVVSYESSSINGRKSGVMLDPLQQQQPPQPPPPPPPPPPSQPQPLQQPQPPQLQPPHQVPPQPQTQPPPTQQPQPPTQAAPLHPYKCTMCNYSTTTLKGLRVHQQHKHSFCDNLPKFEGQPSSLPLENETDSHPSSSNTVKKSQTSILGLSSKNNFVAKASRKLANDFPLDLSPVKKRTRIDEIASNLQSKINQTKQQEDAVINVEDDEEEEEDNEVEIEVELDREEEPTEPIIEVPTSFSAQQIWVRDTSEPQKEPNFRNITHDYNATNGAEIELTLSEDEEDYYGSSTNLKDHQVSNTALLNTQTPIYGTEHNSENTDFGDSGRLYYCKHCDFNNKSARSVSTHYQRMHPYIKFSFRYILDPNDHSAVYRCLECYIDYTNFEDLQQHYGEHHPEAMNVLNFDHSDLIYRCRFCSYTSPNVRSLMPHYQRMHPTVKINNAMIFSSYVVEQQEGLNTESQTLREILNSAPKNMATSTPVARGGGLPATFNKNTPKTFTPECENQKDPLVNTVVVYDCDVCSFASPNMHSVLVHYQKKHPEEKASYFRIQKTMRMVSVDRGSALSQLSFEVGAPMSPKMSNMGSPPPPQPPPPDLSTELYYCKHCSYSNRSVVGVLVHYQKRHPEIKVTAKYIRQAPPTAAMMRGVEGPQGSPRPPAPIQQLNRSSSERDGPPVENEMFFCQHCDYGNRTVKGVLIHYQKKHRDFKANADVIRQHTATIRSLCDRNQKKPASCVLVSPSNLERDKTKLRALKCRQCSYTSPYFYALRKHIKKDHPALKATVTSIMRWAFLDGLIEAGYHCEWCIYSHTEPNGLLLHYQRRHPEHYVDYTYMATKLWAGPDPSPPSLTMPAEAKTYRCRDCVFEAVSIWDITNHYQAFHPWAMNGDESVLLDIIKEKDAVEKPILSSEELAGPVNCENSIPTPFPEQEAECPEDARLSPEKSLQLASANPAISSTPYQCTVCQSEYNNLHGLLTHYGKKHPGMKVKAADFAQDIDINPGAVYKCRHCPYINTRIHGVLTHYQKRHPSIKVTAEDFVHDVEQSADISQNDVEETSRIFKQGYGAYRCKLCPYTHGTLEKLKIHYEKYHNQPEFDVFSQSPPKLPVPLEPEMTTEVSPSQVSITEEEVGEEPVSTSHFSTSHLVSHTVFRCQLCKYFCSTRKGIARHYRIKHNNVRAQPEGKNNLFKCALCAYTNPIRKGLAAHYQKRHDIDAYYTHCLAASRTISDKPNKVIIPSPPKDDSPQLSEELRRAVEKKKCSLCSFQSFSKKGIVSHYMKRHPGVFPKKQHASKLGGYFTAVYADEHEKPTLMEEEERGNFEKAEVEGEAQEIEWLPFRCIKCFKLSFSTAELLCMHYTDHHSRDLKRDFIILGNGPRLQNSTYQCKHCDSKLQSTAELTSHLNIHNEEFQKRAKRQERRKQLLSKQKYADGAFADFKQERPFGHLEEVPKIKERKVVGYKCKFCVEVHPTLRAICNHLRKHVQYGNVPAVSAAVKGLRSHERSHLALAMFTREDKYSCQYCSFVSAFRHNLDRHMQTHHGHHKPFRCKLCSFKSSYNSRLKTHILKAHAGEHAYKCSWCSFSTMTISQLKEHSLKVHGKALTLPRPRIVSLLSSHSHHSSQKATPAEEVEDSNDSSYSEPPDVQQQLNHYQSAALARNNSRVSPVPLSGAAAGTEQKTEAVLHCEFCEFSSGYIQSIRRHYRDKHGGKKLFKCKDCSFYTGFKSAFTMHVEAGHSAVPEEGPKDLRCPLCLYHTKYKRNMIDHIVLHREERVVPIEVCRSKLSKYLQGVVFRCDKCTFTCSSDESLQQHIEKHNELKPYKCQLCYYETKHTEELDSHLRDEHKVSRNFELVGRVNLDQLEQMKEKMESSSSDDEDKEEEMNSKAEDRELMRFSDHGAALNTEKRFPCEFCGRAFSQGSEWERHVLRHGMALNDTKQVSREEIHPKEIMENSVKMPSIEEKEDDEAIGIDFSLKNETVAICVVTADKSLLENAEAKKE

SEQ ID NO: 16181 - protein, 595 aa, Homo Sapiens
MRETLEALSSLGFSVGQPEMAPQSEPREGSHNAQEQMSSSREERALGVCSGHEAPTPEEGAHTEQAEAPCRGQACSAQKAQPVGTCPGEEWMIRKVKVEDEDQEAEEEVEWPQHLSLLPSPFPAPDLGHLAAAYKLEPGAPGALSGLALSGWGPMPEKPYGCGECERRFRDQLTLRLHQRLHRGEGPCACPDCGRSFTQRAHMLLHQRSHRGERPFPCSECDKRFSKKAHLTRHLRTHTGERPYPCAECGKRFSQKIHLGSHQKTHTGERPFPCTECEKRFRKKTHLIRHQRIHTGERPYQCAQCARSFTHKQHLVRHQRVHQTAGPARPSPDSSASPHSTAPSPTPSFPGPKPFACSDCGLSFGWKKNLATHQCLHRSEGRPFGCDECALGATVDAPAAKPLASAPGGPGCGPGSDPVVPQRAPSGERSFFCPDCGRGFSHGQHLARHPRVHTGERPFACTQCDRRFGSRPNLVAHSRAHSGARPFACAQCGRRFSRKSHLGRHQAVHTGSRPHACAVCARSFSSKTNLVRHQAIHTGSRPFSCPQCGKSFSRKTHLVRHQLIHGEAAHAAPDAALAAPAWSAPPEVAPPPLFF

SEQ ID NO: 16182 - protein, 522 aa, Homo Sapiens
MALPQGLLTFRDVAIEFSQEEWKCLDPAQRTLYRDVMLENYRNLVSLDISSKCMLKTLSSTGQGNTEVIHTGTLHRQASHHIGEFCFHEIEKDIHGFEFQWKEDETNGHAAPMTEIKELAGSTGQHDQRHAGNKRIKDQLGSSFHLHLPEPHIFQSEGKIGNQVEKSINNASSVSTSQRICCRPKTHISNKYGNNSLHSSLLTQKWEVHMREKSFECIQSFKSFNCSSLLKKHQIIHLEEKQCKCDVCGKVFNQKRYLACHRRCHTGEKPYKCNECGKTFGHNSSLFIHKALHTGEKPYECEECDKVFSRKSHLERHKRIHTGEKPYKCKVCDEAFAYNSYLAKHTILHTGEKPYTCNECGKVFNRLSTLARHHRLHTGEKPYKCEECDKVFSRKSHLERHRRIHSGEKPYKCEECCKVFSRKSNLERHRRIHTGEKPYKCKVCDKAFQRDSHLAQHQRVHTGEKPYKCNECGKTFGQTSSLIIHRRLHTGEKPYKCNECGKTFSQMSSLVYHHRLHSGEKP

SEQ ID NO: 16183 - protein, 3925 aa, Homo Sapiens
MPGERPRGAPPPTMTGDLQPRQVASSPGHPSQPPLEDNTPATRTTKGAREAGGQAQAMELPEAQPRQARDGELKPPSLRGQAPSSTPGKRGSPQTPPGRSPLQAPSRLAGRAEGSPPQRYILGIASSRTKPTLDETPENPQLEAAQLPEVDTPQGPGTGAPLRPGLPRTEAQPAAEELGFHRCFQEPPSSFTSTNYTSPSATPRPPAPGPPQSRGTSPLQPGSYPEYQASGADSWPPAAENSFPGANFGVPPAEPEPIPKGSRPGGSPRGVSFQFPFPALHGASTKPFPADVAGHAFTNGPLVFAFHQPQGAWPEEAVGTGPAYPLPTQPAPSPLPCYQGQPGGLNRHSDLSGALSSPGAAHSAPRPFSDSLHKSLTKILPERPPSAQDGLGSTRGPPSSLPQRHFPGQAYRASGVDTSPGPPDTELAAPGPPPARLPQLWDPTAAPYPTPPGGPLAATRSMFFNGQPSPGQRLCLPQSAPLPWPQVLPTARPSPHGMEMLSRLPFPAGGPEWQGGSQGALGTAGKTPGPREKLPAVRSSQGGSPALFTYNGMTDPGAQPLFFGVAQPQVSPHGTPSLPPPRVVGASPSESPLPSPATNTAGSTCSSLSPMSSSPANPSSEESQLPGPLGPSAFFHPPTHPQETGSPFPSPEPPHSLPTHYQPEPAKAFPFPADGLGAEGAFQCLEETPFPHEGPEVGRGGLQGFPRAPPPYPTHHFSLSSASLDQLDVLLTCRQCDRNYSSLAAFLAHRQFCGLLLARAKDGHQRSPGPPGLPSPPAAPRVPADAHAGLLSHAKTFLLAGDAQAEGKDDPLRTGFLPSLAATPFPLPASDLDMEDDAKLDSLITEALNGMEYQSDNPEIDSSFIDVFADEEPSGPRGPSSGHPLKSKAGVTPESKAPPPLPAATPDPQTPRPGDRGCPARGRPKTRSLGLAPTEADAPSQGRQQRRGKQLKLFRKDLDSGGAAEGSGSGGGGRASGLRPRRNDGLGERPPPRPRRPRTQAPGSRADPAPRVPRAAALPEETRSSRRRRLPPRKDPRKRKARGGAWGKELILKIVQQKNRLREYDFASESEEDEQPPPRGPGFRGRRGRGEKRKEVELTQGPREDEPQKPRKAARQEAGGDGAPANPEEPGGSRPGPGRSPQARGPSRSLETGAAAREGGPKCADRPSVAPKDPLQVPTNTETSEETRPSLDFPQEAKEPETAEESAPDSTEFTEALRSPPAACAGEMGASPGLLIPEQPPPSRHDTGTPKPSGSLANTAPHGSSPTPGVGSLLGGPGGTQAPVSHNSKDPPARQPGEFLAPVANPSSTACPKPSVLSSKISSFGCDPAGFNRDPLGVPVAKKGPQPYSSPHSELFLGPKDLAGCFLEELHPKPSARDAPPASSSCLCQDGEDAGSLEPQLPRSPPGTAETEPGRAASPPTLESSSLFPDLPVDRFDPPLYGSLSANRDSGLPFACADPPQKTVPSDPPYPSFLLLEEVSPMLPSHFPDLSGGKVLSKTCPPERTVVPGAAPSLPGKGSGCSVALMSHLSEDELEIQKLVTELESQLQRSKDTRGAPRELAEAESVGRVELGTGTEPPSQRRTCQATVPHEDTFSAADLTRVGESTAHREGAESAVATVEAVQGRPGGTWPCPASFHPGHAALLPCAQEDLVSGAPFSPRGANFHFQPVQKAGASKTGLCQAEGDSRPPQDVCLPEPSKQPGPQLDAGSLAKCSPDQELSFPKNKEAASSQESEDSLRLLPCEQRGGFLPEPGTADQPHRGAPAPEAFGSPAVHLAPDLAFQGDGAPPLDATWPFGASPSHAAQGHSAGRAGGHLHPTAGRPGFEGNEFAPAGASSLTAPRGREAWLVPVPSPACVSNTHPSRRSQDPALSPPIRQLQLPGPGVAKSKDGILGLQELTPAAQSPPRVNPSGLEGGTVEGGKVACGPAQGSPGGVQVTTLPAVAGHQLGLEADGHWGLLGQAEKTQGQGTANQLQPENGVSPGGTDNHASVNASPKTALTGPTEGAVLLEKCKGSRAAMSLQEEAEPTPSPPSPNRESLALALTAAHSRSGSEGRTPERASSPGLNKPLLATGDSPAPSVGDLAACAPSPTSAAHMPCSLGPLPREDPLTSPSRAQGGLGGQLPASPSCRDPPGPQQLLACSPAWAPLEEADGVQATTDTGAEDSPVAPPSLTTSPCDPKEALAGCLLQGEGSPLEDPSSWPPGSVSAVTCTHSGDTPKDSTLRIPEDSRKEKLWESPGRATSPPLAGAVSPSVAVRATGLSSTPTGDEAQAGRGLPGPDPQSRGAPPHTNPDRMPRGHSSYSPSNTARLGHREGQAVTAVPTEPPTLQGAGPDSPACLEGEMGTSSKEPEDPGTPETGRSGATKMPRVTCPSTGLGLGRTTAPSSTASDFQSDSPQSHRNASHQTPQGDPLGPQDLKQRSRGYKKKPASTENGQWKGQAPHGPVTCEVCAASFRSGPGLSRHKARKHRPHPGAPAEPSPAALPAQQPLEPLAQKCQPPRKKSHRVSGKERPNHSRGDPSHVTQPPPAQGSKEVLRAPGSPHSQQLHPPSPTEHEVDVKTPASKPRPDQAREDELHPKQAEKREGRRWRREPTVDSPSHSEGKSNKKRGKLRGRRLREESILPVSADVISDGRGSRPSPAMASYAASPSHCLSVEGGPEADGEQPPRLATLGPGVMEGAAETDQEALCAGETGAQKPPGDRMLCPGRMDGAALGEQPTGQKGASARGFWGPRETKALGVCKESGSEPAEDSSRAHSRSEEGVWEENTPPLGPLGFPETSSSPADSTTSSCLQGLPDNPDTQGGVQGPEGPTPDASGSSAKDPPSLFDDEVSFSQLFPPGGRLTRKRNPHVYGKRCEKPVLPLPTQPSFEEGGDPTLGPARLPTDLSDSSSLCLCHEDPWEDEDPAGLPESFLLDGFLNSRVPGIDPWAPGLSLWALEPSREAGAEKLPSHCPEDDRPEAIPELHMVPAAWRGLEMPAPADDSSSSLGDVSPEPPSLERERCDGGLPGNTHLLPLRATDFEVLSTKFEMQDLCFLGPFEDPVGLPGPSFLDFEGTASSQGPQSRRTEEAAGAGRAQGRGRPAKGRRASYKCKVCFQRFRSLGELDLHKLAHTPAPPPTCYMCVERRFGSRELLRGHLQERHAQSKAGPWACGMCLKEVADVWMYNEHLREHAVRFARRGQARRSLGDLPGGLEGSSAVAHLLNSITEPAPKHHRGKRSAGKAAGSPGDPWGQEGEAKKDSPGERAKPRARSTPSNPDGAATPDSASATALADAGSPGPPRTTPSPSPDPWAGGEPLLQATPVHEACKDPSRDCHHCGKRFPKPFKLQRHLAVHSPQRVYLCPRCPRVYPEHGELLAHLGGAHGLLERPELQHTPLYACELCATVMRIIKKSFACSSCNYTFAKKEQFDRHMNKHLRGGRQPFAFRGVRRPGAPGQKARALEGTLPSKRRRVAMPGSAPGPGEDRPPPRGSSPILSEGSLPALLHLCSEVAPSTTKGWPETLERPVDPVTHPIRGCELPSNHQECPPPSLSPFPAALADGRGDCALDGALERPENEASPGSPGPLLQQALPLGASLPRPGARGQDAEGKRAPLVFSGKRRAPGARGRCAPDHFQEDHLLQKEKEVSSSHMVSEGGPRGTFHKGSATKPAGCQSSSKDRSAASTPSKALKFPVHPRKAVGSLAPGELARGTENGMKPATPKAKPGPSSQGSGSPRPGTKTGGGSQPQPASGQLQSETATTPAKPSFPSRSPAPERLPARAQAKSCTKGPREAGEQGPHGSLGPKEKGESSTKRKKGQVPGPARSESVGSFGRAPSAPDKPPRTPRKQATPSRVLPTKPKPNSQNKPRPPPSEQRKAEPGHTQRKDRLGKAFPQGRPLLRPPKRGTAVHGAEPAEPHTHRTAEAQSDLLSQLFGQRLTGFKIPLKKDASE

SEQ ID NO: 16184 - protein, 717 aa, Homo Sapiens
MKSQEEVEVAGIKLCKAMSLGSVTFTDVAIDFSQDEWEWLNLAQRSLYKKVMLENYRNLVSVGLCISKPDVISLLEQEKDPWVIKGGMNRGLCPDLECVWVTKSLSLNQDIYEEKLPPAIIMERLKSYDLECSTLGKNWKCEDLFERELVNQKTHFRQETITHIDTLIEKRDHSNKSGTVFHLNTLSYIKQIFPMEERIFNFHTDKKSLKTHSVVKKHKQDRGEKKLLKCNDCEKIFSKISTLTLHQRIHTGEKPYECIECGKAFSQSAHLAQHQRIHTGEKPFECTECGKAFSQNAHLVQHQRVHTGEKPYQCKQCNKAFSQLAHLAQHQRVHTGEKPYECIECGKAFSDCSSLAHHRRIHTGKRPYECIDCGKAFRQNASLIRHRRYYHTGEKPFDCIDCGKAFTDHIGLIQHKRTHTGERPYKCNVCGKAFSHGSSLTVHQRIHTGEKPYECNICEKAFSHRGSLTLHQRVHTGEKPYECKECGKAFRQSTHLAHHQRIHTGEKPYECKECSKTFSQNAHLAQHQKIHTGEKPYECKECGKAFSQIAHLVQHQRVHTGEKPYECIECGKAFSDGSYLVQHQRLHSGKRPYECLECGKAFRQRASLICHQRCHTGEKPYECNVCGKAFSHRKSLTLHQRIHTGEKPYECKECSKAFSQVAHLTLHKRIHTGERPYECKECGKAFRQSVHLAHHQRIHTGESSVILSSALPYHQVL

SEQ ID NO: 16185 - protein, 626 aa, Homo Sapiens
MNVEVVKVMPQDLVTFKDVAIDFSQEEWQWMNPAQKRLYRSMMLENYQSLVSLGLCISKPYVISLLEQGREPWEMTSEMTRSPFSDWESIYVTQELPLKQFMYDDACMEGITSYGLECSTFEENWKWEDLFEKQMGSHEMFSKKEIITHKETITKETEFKYTKFGKCIHLENIEESIYNHTSDKKSFSKNSMVIKHKKVYVGKKLFKCNECDKTFTHSSSLTVHFRIHTGEKPYACEECGKAFKQRQHLAQHHRTHTGEKLFECKECRKAFKQSEHLIQHQRIHTGEKPYKCKECRKAFRQPAHLAQHQRIHTGEKPYECKECGKAFSDGSSFARHQRCHTGKRPYECIECGKAFRYNTSFIRHWRSYHTGEKPFNCIDCGKAFSVHIGLILHRRIHTGEKPYKCGVCGKTFSSGSSRTVHQRIHTGEKPYECDICGKDFSHHASLTQHQRVHSGEKPYECKECGKAFRQNVHLVSHLRIHTGEKPYECKECGKAFRISSQLATHQRIHTGEKPYECIECGNAFKQRSHLAQHQKTHTGEKPYECNECGKAFSQTSNLTQHQRIHTGEKPYKCTECGKAFSDSSSCAQHQRLHTGQRPYQCFECGKAFRRKLSLICHQRSHTGEEP

SEQ ID NO: 16186 - protein, 871 aa, Homo Sapiens
MAEEFVTLKDVGMDFTLGDWEQLGLEQGDTFWDTALDNCQDLFLLDPPRPNLTSHPDGSEDLEPLAGGSPEATSPDVTETKNSPLMEDFFEEGFSQEIIEMLSKDGFWNSNFGEACIEDTWLDSLLGDPESLLRSDIATNGESPTECKSHELKRGLSPVSTVSTGEDSMVHNVSEKTLTPAKSKEYRGEFFSYSDHSQQDSVQEGEKPYQCSECGKSFSGSYRLTQHWITHTREKPTVHQECEQGFDRNASLSVYPKTHTGYKFYVCNEYGTTFSQSTYLWHQKTHTGEKPCKSQDSDHPPSHDTQPGEHQKTHTDSKSYNCNECGKAFTRIFHLTRHQKIHTRKRYECSKCQATFNLRKHLIQHQKTHAAKTTSECQECGKIFRHSSLLIEHQALHAGEEPYKCNERGKSFRHNSTLKIHQRVHSGEKPYKCSECGKAFHRHTHLNEHRRIHTGYRPHKCQECVRSFSRPSHLMRHQAIHTAEKPYSCAECKETFSDNNRLVQHQKMHTVKTPYECQECGERFICGSTLKCHESVHAREKQGFFVSGKILDQNPEQKEKCFKCNKCEKTFSCSKYLTQHERIHTRGVKPFECDQCGKAFGQSTRLIHHQRIHSRVRLYKWGEQGKAISSASLIKLQSFHTKEHPFKCNECGKTFSHSAHLSKHQLIHAGENPFKCSKCDRVFTQRNYLVQHERTHARKKPLVCNECGKTFRQSSCLSKHQRIHSGEKPYVCDYCGKAFGLSAELVRHQRIHTGEKPYVCQECGKAFTQSSCLSIHRRVHTGEKPYRCGECGKAFAQKANLTQHQRIHTGEKPYSCNVCGKAFVLSAHLNQHLRVHTQETLYQCQRCQKAFRCHSSLSRHQRVHNKQQYCL

SEQ ID NO: 16187 - protein, 364 aa, Homo Sapiens
MERGKKKRISNKLQQTFHHSKEPTFLINQAGLLSSDSYSSLSPETESVNPGENIKTDTQKKRPGTVILSKLSSRRIISESQLSPPVIPARRPGFRVCYICGREFGSQSIAIHEPQCLQKWHIENSKLPKHLRRPEPSKPQSLSSSGSYSLQATNEAAFQSAQAQLLPCESCGRTFLPDHLLVHHRSCKPKGEGPRAPHSNSSDHLTGLKKACSGTPARPRTVICYICGKEFGTLSLPIHEPKCLEKWKMENDRLPVELHQPLPQKPQPLPNAQSSQAGPNQAQLVFCPHCSRIFTSDRLLVHQRSCKTHPYGPKYQNLNLGSKGGLKEYTNSKQQRNRAAPSVTDKVIHATQDALGEPGGALCL

SEQ ID NO: 16188 - protein, 1883 aa, Homo Sapiens; identical to SEQ ID NO: 15972

SEQ ID NO: 16189 - protein, 524 aa, Homo Sapiens
MAKRPGPPGSREMGLLTFRDIAIEFSLEEWQCLDCAQRNLYRDVMLENYRNLVSLGIAVSKPDLITCLEQNKESQNIKRNEMVAKHPVTRSHFTQDLQPEQGIKDSLQKVIPRTYGKCGHEKLQFKKCCKSVGEYEVHKGGYSEVNQCLSTTQNKIFQTHKYVKVFGKFSNSNRDKTRYTGNKHFKCNKYGKSFCMLSHLNQHQVIHTREKSYKCKECGKSFNCSSNHTTHKIIHTGEKPYRCEECGKAFSWSANLTRHKRTHTGEKPYTCEECGQAFRRSSALTNHKRIHTGERPYKCEECGKAFSVSSTLTDHKRIHTGEKPCRCEECGKAFSWSSNLTRHKRIHTREKPYACEECGQAFSLSSNLMRHRRIHTGEKPYTCEECGQDFRRSSALTIHKRIHTGERPYKCEECGKVFSLSSTLTDHKRIHTGERPYKCEECGKAFSLSSTLTDHKRIHTGERPYTCEECGKAFNCSSTLMQHKRIHTGEKPYKCEECEQAFKWHSSLAKHKIIHTGEKPYKCE

SEQ ID NO: 16190 - protein, 618 aa, Homo Sapiens
MERAVEPWGPDLHRPEEREPQRGARTGLGSENVISQPNEFEHTPQEDDLGFKEEDLAPDHEVGNASLKPEGIQNWDDLWVQREGLGKPQPRDRGPRLLGEPRWGQASSDRAAVCGECGKSFRQMSDLVKHQRTHTGEKPYKCGVCGKGFGDSSARIKHQRTHSGEKPYRARPPAQGPPKIPRSRIPAGERPTICGECGKSFRQSSDLVKHQRTHTGEKPYKCGICGKGFGDSSARIKHQRTHRGEQPPRPVVPRRQPSRAATAATQGPKAQDKPYICTDCGKRFVLSCSLLSHQRSHLGPKPFGCDVCGKEFARGSDLVKHLRVHTGEKPYLCPECGKGFADSSARVKHLRTHSGERPHACPECDRTFSLSSTLLRHRLTHMEPQDFSFPGYPLPALIPSPPPPPLGTSPPLTPRSPSHSGEPFGLPGLEPEPGGPQAGEPPPPLAGDKPHKCPECGKGFRRSSDLVKHHRVHTGEKPYLCPECGKGFADSSARVKHLRTHRGERARPPPPSTLLRPHNPPGPVPMAPRPRVRAQPSGPSQPHVCGFCGKEFPRSSDLVKHRRTHTGEKPYKCAECGKGFGDSSARIKHQRGHLVLTPFGIGDGRARPLKQEAATGLE

SEQ ID NO: 16191 - protein, 535 aa, Homo Sapiens
MLCDEKAQKRRKRKAKESGMALPQGHLTFRDVAIEFSQAEWKCLDPAQRALYKDVMLENYRNLVSLGISLPDLNINSMLEQRREPWSGESEVKIAKNSDGRECIKGVNTGSSYALGSNAEDKPIKKQLGVSFHLHLSELELFPDERVINGCNQVENFINHSSSVSCLQEMSSSVKTPIFNRNDFDDSSFLPQEQKVHLREKPYECNEHSKVFRVSSSLTKHQVIHTVEKPYKCNSCGKVFSRNSHLAEHCRIHTGEKPYKCNVCGKVFSYNSNFARHQRIHTREKPYECNECGKVFSNNSYLARHQRIHAEEKPYKCNECGKGFSHKSSLANHWRIYTGEKPYKCDECGKAFYRIALLVRHQKIHTGEKPYKCNECGKVFIQNSHLAQHWRIHTGEKPYKCNECGKVFNQLSNLARHRRIHTGEKPYKCNECGKAFSEYSGLSAHLVIHTGEKPYKCSECGKAFRHKLSLTNHQRIHTGERPYKCNECGKVFNRIAHLARHRKIHTGEKPYKCNECGKAFSRISYLAQHWTIHMG

SEQ ID NO: 16192 - protein, 744 aa, Homo Sapiens
MQAVVPLNKMTAISPEPQTLASTEQNEVPRVVTSGEQEAILRGNAADAESFRQRFRWFCYSEVAGPRKALSQLWELCNQWLRPDIHTKEQILELLVFEQFLTILPGEIRIWVKSQHPESSEEVVTLIEDLTQMLEEKDPVSQDSTVSQEENSKEDKMVTVCPNTESCESITLKDVAVNFSRGEWKKLEPFQKELYKEVLLENLRNLEFLDFPVSKLELISQLKWVELPWLLEEVSKSSRLDESALDKIIERCLRDDDHGLMEESQQYCGSSEEDHGNQGNSKGRVAQNKTLGSGSRGKKFDPDKSPFGHNFKETSDLIKHLRVYLRKKSRRYNESKKPFSFHSDLVLNRKEKTAGEKSRKSNDGGKVLSHSSALTEHQKRQKIHLGDRSQKCSKCGIIFIRRSTLSRRKTPMCEKCRKDSCQEAALNKDEGNESGEKTHKCSKCGKAFGYSASLTKHRRIHTGEKPYMCNECGKAFSDSSSLTPHHRTHSGEKPFKCDDCGKGFTLSAHLIKHQRIHTGEKPYKCKDCGRPFSDSSSLIQHQRIHTGEKPYTCSNCGKSFSHSSSLSKHQRIHTGEKPYKCGECGKAFRQNSCLTRHQRIHTGEKPYLCNDCGMTFSHFTSVIYHQRLHSGEKPYKCNQCEKAFPTHSLLSRHQRIHTGVKPYKCKECGKSFSQSSSLNEHHRIHTGEKPYECNYCGATFSRSSILVEHLKIHTGRREYECNECEKTFKSNSGLIRHRGFHSAE

SEQ ID NO: 16193 - protein, 852 aa, Homo Sapiens
MTKSLESVSFKDVTVDFSRDEWQQLDLAQKSLYREVMLENYFNLISVGCQVPKPEVIFSLEQEEPCMLDGEIPSQSRPDGDIGFGPLQQRMSEEVSFQSEININLFTRDDPYSILEELWKDDEHTRKCGENQNKPLSRVVFINKKTLANDSIFEYKDIGEIVHVNTHLVSSRKRPHNCNSCGKNLEPIITLYNRNNATENSDKTIGDGDIFTHLNSHTEVTACECNQCGKPLHHKQALIQQQKIHTRESLYLFSDYVNVFSPKSHAFAHESICAEEKQHECHECEAVFTQKSQLDGSQRVYAGICTEYEKDFSLKSNRQKTPYEGNYYKCSDYGRAFIQKSDLFRCQRIHSGEKPYEYSECEKNLPQNSNLNIHKKIHTGGKHFECTECGKAFTRKSTLSMHQKIHTGEKPYVCTECGKAFIRKSHFITHERIHTGEKPYECSDCGKSFIKKSQLHVHQRIHTGENPFICSECGKVFTHKTNLIIHQKIHTGERPYICTVCGKAFTDRSNLIKHQKIHTGEKPYKCSDCGKSFTWKSRLRIHQKCHTGERHYECSECGKAFIQKSTLSMHQRIHRGEKPYVCTECGKAFFHKSHFITHERIHTGEKPYECSICGKSFTKKSQLHVHQQIHTGEKPYRCAECGKAFTDRSNLFTHQKIHTGEKPYKCSDCGKAFTRKSGLHIHQQSHTGERHYECSECGKAFARKSTLIMHQRIHTGEKPYICNECGKSFIQKSHLNRHRRIHTGEKPYECSDCGKSFIKKSQLHEHHRIHTGEKPYICAECGKAFTIRSNLIKHQKIHTKQKPYKCSDLGKALNWKPQLSMPQKSDNGEVECSMPQLWCGDSEGDQGQLSSI

SEQ ID NO: 16194 - protein, 441 aa, Homo Sapiens
MAPRAQIQGPLTFGDVAVAFTRIEWRHLDAAQRALYRDVMLENYGNLVSVGLLSSKPKLITQLEQGAEPWTEVREAPSGTHAVEDYWFETKMSALKQSTSEASVLGERTKSVMMEKGLDWEGRSSTEKNYKCKECGKVFKYNSSFISHQRNHTSEKPHKCKECGIAFMNSSSLLNHHKVHAGKQPYRCIECGKFLKKHSTFINHQRIHSREKPHKCIECGKTFRKNSILLSHQRIHTGQKPYKCNDCGKAFAQNAALTRHERIHSGEKPFKCNKCGRAFRDNSTVLEHQKIHTGEKPYQCNECGKAFRKSSTLISHQRMHTGEKPYHCSKCGKSFRYSSSFAGHQKTHSGNKPYQCRDCGKAFTKSSTLTGHQRIHTGEKPYHCKKCGKAFRHSSGLVEHQRLHTGEKPYKCNECGKAFPRSSALKQHKKIHNKERAMKCS

SEQ ID NO: 16195 - protein, 463 aa, Homo Sapiens
MPGPLRSLEMESLQFRDVAVEFSLEEWHCLDTAQQNLYRDVMLENYRHLVFLGIIVSKPDLITCLEQGIKPLTMKRHEMIAKPPVVCSHFAQDLWPEQSIKDSYQKVILRKFEKCGHGNLHFKKGCESVDECKLHKRGYNGLNQCLTTTQSKIFQCGKYVKVFHQFSNSKRHKRRHTEKKPLKYIEGDKAFNQSSTHTTHKKIDTGEKPYKCEECGKAFNRSSHLTTHKITHTREKPYKCEECGKVFKYFSSFTTHKKIHSGEKPYICEECGKAFMYPYTLTTHKIIHTGEQPYKCKECDKAFNHPATLSSHKKIHTGEKPYTCDKCGKAFISSSILSKHEKIHTGEKPYKCEECGKAFTRSSHLTMHKIIHTGEKPYKCEECGKAFTWSAGLHKHRRTHTGEKPYKCEECGKAYTTSSNLTEHKTTHTGEKPYKCKECGKAFNWSSDLNKHKRIHIGQKPRT

SEQ ID NO: 16196 - protein, 448 aa, Homo Sapiens [sequence omitted]

SEQ ID NO: 16197 - protein, 340 aa, Homo Sapiens; identical to SEQ ID NO: 14439

SEQ ID NO: 16198 - protein, 529 aa, Homo Sapiens
MRRNSSLSFQMERPLEEQVQSKWSSSQGRTGTGGSDVLQMQNSEHHGQSIKTQTDSISLEDVAVNFTLEEWALLDPGQRNIYRDVMRATFKNLACIGEKWKDQDIEDEHKNQGRNLRSPMVEALCENKEDCPCGKSTSQIPDLNTNLETPTGLKPCDCSVCGEVFMHQVSLNRHMRSHTEQKPNECHEYGEKPHKCKECGKTFTRSSSIRTHERIHTGEKPYECKECGKAFAFLFSFRNHIRIHTGETPYECKECGKAFRYLTALRRHEKNHTGEKPYKCKQCGKAFIYYQPFLTHERTHTGEKPYECKQCGKAFSCPTYLRSHEKTHTGEKPFVCRECGRAFFSHSSLRKHVKTHTGVQPYTCKKCGEAFKSSSSCEVHERTHFGEKPYECKQCGKAFNSSSYLQLHERVHTGEKTYECKECGKAFLYSTHFRIHERTHTREKPYECKQCGRVFIYFSHLRRHERSHTGVKPCECKQCGKAFTCLNSLKVHKRIHTGERPFQCRQCGKAFSYSKSLHVHERTHSRQKP

SEQ ID NO: 16199 - protein, 437 aa, Homo Sapiens
MGERLFESAEGSQCGETFTQVPEDMLNKKTLPGVKSCESGTCGEIFMGYSSFNRNIRTDTGHQPHKCQKFLEKPYKHKQRRKALSHSHCFRTHERPHTREKPFDCKECEKSFISPASIRRYMVTHSGDGPYKCKFCGKALDCLSLYLTHERTHTGEKRYECKQCGKAFSWHSSVRIHERTHTGEKPYECKECGKSFNFSSSFRRHERTHTGEKPYKCKECGKAFNCPSSFHRHERTHTGEKPYECKLYGKALSRLISFRRHMRMHTGERPHKCKICGKAFYSPSSFQRHERSHTGEKPYKCKQCGKAFTCSTSFQYHERTHTGEKPDGCKQCGKAFRSAKYIRIHGRTHTGEKPYECKQCGKAFHCVSSFHRHERTHAGEKPYECKHCGKAFTCSIYIRIHERIHTGEKPYQCKECGKAFIRSSYCRKHERTHTINI

SEQ ID NO: 16200 - protein, 531 aa, Homo Sapiens
MLENYRNLVFVGIAASKPDLITCLEQGKEPWNVKRHEMVAEPPVVCSYFARDLWPKQGKKNYFQKVILRRYKKCGCENLQLRKYCKSMDECKVHKECYNGLNQCLTTTQNKIFQCDKYVKVFHKFSNSNRHTIRHTGKKSFKCKECEKSFCMLSHLAQHKRIHSGEKPYKCKECGKAYNETSNLSTHKRIHTGKKPYKCEECGKAFNRLSHLTTHKIIHTGKKPYKCEECGKAFNQSANLTTHKRIHTGEKPYKCEECGRAFSQSSTLTAHKIIHAGEKPYKCEECGKAFSQSSTLTTHKIIHTGEKFYKCEECGKAFSQLSHLTTHKRIHSGEKPYKCEECGKAFKQSSTLTTHKRIHAGEKFYKCEVCSKAFSRFSHLTTHKRIHTGEKPYKCEECGKAFNLSSQLTTHKIIHTGEKPYKCEECGKAFNQSSTLSKHKVIHTGEKPYKYEECGKAFNQSSHLTTHKMIHTGEKPYKCEECGKAFNNSSILNRHKMIHTGEKLYKPESCNNACDNIAKISKYKRNCAGEK

SEQ ID NO: 16201 - protein, 646 aa, Homo Sapiens
MNECNVHKEGYNELNQYLTTTQSKIFQCDKYVKVFHKLLNSNRHNTKHTGKKPFKCKKCGKSFCMLLHLCQHKRIHIRENSYRCEECGKAFIWFSTLTRHRRVHTGEKSYKYECGKSFNQDSNLTTHKRIHTGQKPYKCEECGTSFYQFSYLTRHKLIHTREKPYKCEQYGKTFNQSSTLTGHKIIHNGEKPYKCEECGKAFSIFSTPTKHKIIHTEEKSHRCEEYCKAYKESSHLTTHKRIHTGEKPYKCEECGKAFSIFSTLTKHKIIHTEEKSHRCEECGKAYKESSHLTTHKRIHTGEKPYKCEECGKTFSVFSILTKHKIIHTEEKPYKCEECGKAFKRSSTLTKHRIIHTEEKPYKCEECGKAFNQSSTLSIHKIIHTGEKPYKCEECGKAFKRSSTLTIHKMIHTGEKPYKCEECGKAFNRSSHLTTHKRIHTGHKPYKCKECGKSFSVFSTLTKHKIIHTDKKPYKCEECGKAFNRSSILSIHKKIHTGEKPYKCEECGKAFKRSSHLAGHKQIHSVQKPYKCEECGKAFSIFSTLTKHKIIHTEEKPYKCEKCGKTFYRFSNLNTHKIIHTGEKPCKCEECGKAFNHSSNLIKHKLIHTGDKPYKCEACGKAFRRSSHLSRHKIIHIGIHTEETVQK

SEQ ID NO: 16202 - protein, 587 aa, Homo Sapiens
MPTALCPRVLAPKESEEPRKMRSPPGENPSPQGELPSPESSRRLFRRFRYQEAAGPREALQRLWDLCGGWLRPERHTKEQILELLVLEQFLAILPREIQSWVRAQEPESGEQAVAAVEALEREPGRPWQWLKHCEDPVVIDDGDSPLDQEQEQLPVEPHSDLAKNQDAQPITLAQCLGLPSRPPSQLSGDPVLQDAFLLQEENVRDTQQVTTLQLPPSRVSPFKDMILCFSEEDWSLLDPAQTGFYGEFIIGEDYGVSMPPNDLAAQPDLSQGEENEPRVPELQDLQGKEVPQVSYLDSPSLQPFQVEERRKREELQVPEFQACPQTVVPQNTYPAGGNPRSLENSLDEEVTIEIVLSSSGDEDSQHGPYCTEELGSPTEKQRSLPASHRSSTEAGGEVQTSKKSYVCPNCGKIFRWRVNFIRHLRSRREQEKPHECSVCGELFSDSEDLDGHLESHEAQKPYRCGACGKSFRLNSHLLSHRRIHLQPDRLQPVEKREQAASEDADKGPKEPLENGKAKLSFQCCECGKAFQRHDHLARHRSHFHLKDKARPFQCRYCVKSFTQNYDLLRHERLHMKRRSKQALNSY

SEQ ID NO: 16203 - protein, 498 aa, Homo Sapiens
MESPRGWTLQVAPEEGQVLCNVKTATRGLSEGAVSGGWGAWENSTEVPREAGDGQRQQATLGAADEQGGPGRELGPADGGRDGAGPRSEPADRALRPSPLPEEPGCRCGECGKAFSQGSYLLQHRRVHTGEKPYTCPECGKAFAWSSNLSQHQRIHSGEKPYACRECGKAFRAHSQLIHHQETHSGLKPFRCPDCGKSFGRSTTLVQHRRTHTGEKPYECPECGKAFSWNSNFLEHRRVHTGARPHACRDCGKAFSQSSNLAEHLKIHAGARPHACPDCGKAFVRVAGLRQHRRTHSSEKPFPCAECGKAFRESSQLLQHQRTHTGERPFECAECGQAFVMGSYLAEHRRVHTGEKPHACAQCGKAFSQRSNLLSHRRTHSGAKPFACADCGKAFRGSSGLAHHRLSHTGERPFACAECGKAFRGSSELRQHQRLHSGERPFVCAHCSKAFVRKSELLSHRRTHTGERPYACGECGKPFSHRCNLNEHQKRHGGRAAP

SEQ ID NO: 16204 - protein, 480 aa, Homo Sapiens
MATVPGLQPLPTLEQDLEQEEILIVKVEEDFCLEEEPSVETEDPSPETFRQLFRLFCYQEVAGPREALSRLWELCCRWLRPELRTKEQILELLVLEQFLTVLPGEIQARVREQQPESGEEAVVLVEGLQRKPRKHRQRGSELLSDDEVPLGIGGQFLKHQAEAQPEDLSLEEEARFSSQQPPAQLSHRPQRGPLLWPERGPPAPRHQEMASASPFLSAWSQVPVNLEDVAVYLSGEEPRCMDPAQRDAPLENEGPGIQLEDGGDGREDAPLRMEWYRVLSARCQGPGHPLPGQRPAPVRGLVRPDQPRGGPPPGRRASHGADKPYTCPECGKGFSKTSHLTKHQRTHTGERPYKCLVCGKGFSDRSNFSTHQRVHTGEKPYPCPECGKRFSQSSSLVIHRRTHSGERPYACTQCGKRFNNSSHFSAHRRTHTGEKPYTCPACGRGFRRGTDLHKHQRTHMGAGSLPTLQPVAPGGPGAKA

SEQ ID NO: 16205 - protein, 271 aa, Homo Sapiens
MNSSQISLRMKHGRVNMQKKPSKCSECGKFFTQRSSLTQHQRIHRGEKPYVCSECGSCFRKQSNLTQHLRIHTGEKPYKCNECEKAFQTKAILVQHLRIHTGEKPYKCNECGKAFCQSPSLIKHQRIHTGEKPYKCTECGKAFSQSICLTRHQRSHSGDKPFKCNECGKAFNQSACLMQHQRIHSGEKPYTCTECGKAFTQNSSLVEHERTHTGEKLYKCSECEKTFRKQAHLSEHYRIHTGEKPYECVGCGKSFRHSSALLRHQRLHAGE

SEQ ID NO: 16206 - protein, 544 aa, Homo Sapiens
MLNMQGAEERDIRRETCPGWVNKNKPALEQDVCKIDSSGIVVKRFQEDEYQDSTFEEKYACEGMKENSPREIAESCLFQEGGFGRITFIHKEAPPEIISQGYNFEKSLLLTSSLVTRLRVSTEESLHQWETSNIQTNDISDQSKCPTLCTQKKSWKCNECGKTFTQSSSLTQHQRTHTGERPYTCEECGKAFSRSSFLVQHQRIHTGVKPYGCEQCGKTFRCRSFLTQHQRIHTGEKPYKCNECGNSFRNHSHLTEHQRIHTGEKPYKCNRCGKAFNQNTHLIHHQRIHTGEKPYICSECGSSFRKHSNLTQHQRIHTGEKPHKCDECGKTFQTKANLSQHQRIHSGEKPYKCKECGKAFCQSPSLIKHQRIHTGEKPYKCKECGKAFTQSTPLTKHQRIHTGERPYKCSECGKAFIQSICLIRHQRSHTGEKPYKCNECGKGFNQNTCLTQHMRIHTGEKPYKCKECGKAFAHSSSLTEHHRTHTGEKLYKCSECEKTFRKYAHLSEHYRIHTGEKPYECIECGKFFRHSSVLFRHQKLHSGD

SEQ ID NO: 16207 - protein, 646 aa, Homo Sapiens
MSTAPSLSALRSSKHSGGGGGGGGGGGADPAWTSALSGNSSGPGPGSSPAGSTKPFVHAVPPSDPLRQANRLPIKVLKMLTARTGHILHPEYLQPLPSTPVSPIELDAKKSPLALLAQTCSQIGKPDPSPSSKLSSVASNGGGAGGAGGGAAGDKDTKSGPLKLSDIGVEDKSSFKPYSKPGSDKKEPGGGGGGGGGGGGGGGGVSSEKSGFRVPSATCQPFTPRTGSPSSSASACSPGGMLSSAGGAPEGKDDKKDTDVGGGGKGTGGASAEGGPTGLAHGRISCGGGINVDVNQHPDGGPGGKALGSDCGGSSGSSSGSGPSAPTSSSVLGSGLVAPVSPYKPGQTVFPLPPAGMTYPGSLAGAYAGYPPQFLPHGVALDPTKPGSLVGAQLAAAAAGSLGCSKPAGSSPLAGASPPSVMTASLCRDPYCLSYHCASHLAGAAAASASCAHDPAAAAAALKSGYPLVYPTHPLHGVHSSLTAAAAAGATPPSLAGHPLYPYGFMLPNDPLPHICNWVSANGPCDKRFATSEELLSHLRTHTAFPGTDKLLSGYPSSSSLASAAAAAMACHMHIPTSGAPGSPGTLALRSPHHALGLSSRYHPYSKSPLPTPGAPVPVPAATGPYYSPYALYGQRLTTASALGYQ

SEQ ID NO: 16208 - protein, 444 aa, Homo Sapiens
MGPLQFRDVAIEFSLEEWHCLDAAQRNLYRDVMLENYRNLIFLGIVVSKPNLITCLEQGKKPLTMKRHEMIAKPPVMYSHFAQDLWSEQSIKDSFQKVILRRYEKCRHDNLQLKKGCESVDECPVHKRGYNGLKQCLATTQRKIFQCDEYVKFLHKFSNSNKHKIRDTGKKSFKCIEYGKTFNQSSTRTTYKKIDAGEKRYKCEECGKAYKQSSHLTTHKKIHTGEKPYKCEECGKAYKQSCNLTTHKIIHTGEKPYRCRECGKAFNHPATLFSHKKIHTGEKPYKCDKCGKAFISSSTLTKHEIIHTGEKPYKCEECGKAFNRSSNLTKHKRIHTGDVPYKCDECGKTFTWYSSLSKHKRAHTGEKPYKCEECGKAFTAFSTLTEHKIIHTGEKPYKCEECGKAFNWSSALNKHKKIHIRQKPCIVKNVENLLNVPQPLISIR

SEQ ID NO: 16209 - protein, 953 aa, Homo Sapiens
MEESSSVAMLVPDIGEQEAILTAESIISPSLEIDEQRKTKPDPLIHVIQKLSKIVENEKSQKCLLIGKKRPRSSAATHSLETQELCEIPAKVIQSPAADTRRAEMSQTNFTPDTLAQNEGKAMSYQCSLCKFLSSSFSVLKDHIKQHGQQNEVILMCSECHITSRSQEELEAHVVNDHDNDANIHTQSKAQQCVSPSSSLCRKTTERNETIPDIPVSVDNLQTHTVQTASVAEMGRRKWYAYEQYGMYRCLFCSYTCGQQRMLKTHAWKHAGEVDCSYPIFENENEPLGLLDSSAAAAPGGVDAVVIAIGESELSIHNGPSVQVQICSSEQLSSSSPLEQSAERGVHLSQSVTLDPNEEEMLEVISDAEENLIPDSLLTSAQKIISSSPNKKGHVNVIVERLPSAEETLSQKRFLMNTEMEEGKDLSLTEAQIGREGMDDVYRADKCTVDIGGLIIGWSSSEKKDELMNKGLATDENAPPGRRRTNSESLRLHSLAAEALVTMPIRAAELTRANLGHYGDINLLDPDTSQRQVDSTLAAYSKMMSPLKNSSDGLTSLNQSNSTLVALPEGRQELSDGQVKTGISMSLLTVIEKLRERTDQNASDDDILKELQDNAQCQPNSDTSLSGNNVVEYIPNAERPYRCRLCHYTSGNKGYIKQHLRVHRQRQPYQCPICEHIADNSKDLESHMIHHCKTRIYQCKQCEESFHYKSQLRNHEREQHSLPDTLSIATSNEPRISSDTADGKCVQEGNKSSVQKQYRCDVCDYTSTTYVGVRNHRRIHNSDKPYRCSLCGYVCSHPPSLKSHMWKHASDQNYNYEQVNKAINDAISQSGRVLGKSPGKTQLKSSEESADPVTGSSENAVSSSELMSQTPSEVLGTNENEKLSPTSNTSYSLEKISSLAPPSMEYCVLLFCCCICGFESTSKENLLDHMKEHEGEIVNIILNKDHNTALNTN

SEQ ID NO: 16210 - protein, 683 aa, Homo Sapiens
MSPHPEAITDCVTLNTVGQLAEGGYPLRFSTLFQEQQKMNISQASVSFKDVTIEFTQEEWQQMAPVQKNLYRDVMLENYSNLVSVGYCCFKPEVIFKLEQGEEPWFSEEEFSNQSHPKDYRGDDLIKQNKKIKDKHLEQAICINNKTLTTEEEKVLGKPFTLHVAAVASTKMSCKCNSWEVNLQSISEFIINNRNYSTKKIGCGNVCENSPFKINFEKTQTGEKFYEHNKNMKALNYNENLPKHPKFQTLEQAFECNKIGKAFNDKANCVKHNSSHTGETSSKDDEFRKNCDKKTLFDHRRTGTGKKHLHLNQCGKSFEKSTVEEYNKLNMGIKHYELNPSGNNFNRKAHLTDPQTAVIEENPLVSNDRTQTWVKSSEYHENKKSYQTSVHRVRRRSHSMMKPYKCNECGKSFCQKGHLIQHQRTHTGEKPFECSECGKTFSQKSHLSTHQRIHTAEKPYKCNECGKTFVQKSTLRGHQRIHTGEKPYECSECGKTFVQKSTLRDHHRIHTGEKSFQCNQCGKTFGQKSNLRIHQRTHTGEKTYQCNECEKSFWRKDHLIQHQKTHTGEKPFKCNECGKTFARTSTLRVHQRIHTGEKPFKCNECGKKFVRKAILSDHQRIHTGEKPFQCNKCGKTFGQKSNLRIHQRTHSGEKSYECNEYGKLCKKSTLSLYQKIQGEGNPY

SEQ ID NO: 16211 - protein, 262 aa, Homo Sapiens; identical to SEQ ID NO: 14441

SEQ ID NO: 16212 - protein, 567 aa, Homo Sapiens
MSSRLGAVPATSGPTTFKQQRSTRIVGAKNSRTQCSIKDNSFQYTIPHDDSLSGSSSASSCEPVSDFPASFRKSTYWMKMRRIKPAATSHVEGSGGVSAKGKRKPRQEEDEDYREFPQKKHKLYGRKQRPKTQPNPKSQARRIRKEPPVYAAGSLEEQWYLEIVDKGSVSCPTCQAVGRKTIEGLKKHMENCKQEMFTCHHCGKQLRSLAGMKYHVMANHNSLPILKAGDEIDEPSERERLRTVLKRLGKLRCMRESCSSSFTSIMGYLYHVRKCGKGAAELEKMTLKCHHCGKPYRSKAGLAYHLRSEHGPISFFPESGQPECLKEMNLESKSGGRVQRRSAKIAVYHLQELASAELAKEWPKRKVLQDLVPDDRKLKYTRPGLPTFSQEVLHKWKTDIKKYHRIQCPNQGCEAVYSSVSGLKAHLGSCTLGNFVAGKYKCLLCQKEFVSESGVKYHINSVHAEDWFVVNPTTTKSFEKLMKIKQRQQEEEKRRQQHRSRRSLRRRQQPGIELPETELSLRVGKDQRRNNEELVVSASCKEPEQEPVPAQFQKVKPPKTNHKRGRK

SEQ ID NO: 16213 - protein, 892 aa, Homo Sapiens
MTDPFCVGGRRLPGSSKSGPGKDGSRKEVRLPMLHDPPKMGMPVVRGGQTVPGQAPLCFDPGSPASDKTEGKKKGRPKAENQALRDIPLSLMNDWKDEFKAHSRVKCPNSGCWLEFPSIYGLKYHYQRCQGGAISDRLAFPCPFCEAAFTSKTQLEKHRIWNHMDRPLPASKPGPISRPVTISRPVGVSKPIGVSKPVTIGKPVGVSKPIGISKPVSVGRPMPVTKAIPVTRPVPVTKPVTVSRPMPVTKAMPVTKPITVTKSVPVTKPVPVTKPITVTKLVTVTKPVPVTKPVTVSRPIVVSKPVTVSRPIAISRHTPPCKMVLLTRSENKAPRATGRNSGKKRAADSLDTCPIPPKQARPENGEYGPSSMGQSSAFQLSADTSSGSLSPGSRPSGGMEALKAAGPASPPEEDPERTKHRRKQKTPKKFTGEQPSISGTFGLKGLVKAEDKARVHRSKKQEGPGPEDARKKVPAAPITVSKEAPAPVAHPAPGGPEEQWQRAIHERGEAVCPTCNVVTRKTLVGLKKHMEVCQKLQDALKCQHCRKQFKSKAGLNYHTMAEHSAKPSDAEASEGGEQEERERLRKVLKQMGRLRCPQEGCGAAFSSLMGYQYHQRRCGKPPCEVDSPSFPCTHCGKTYRSKAGHDYHVRSEHTAPPPEEPTDKSPEAEDPLGVERTPSGRVRRTSAQVAVFHLQEIAEDELARDWTKRRMKDDLVPETARLNYTRPGLPTLNPQLLEAWKNEVKEKGHVNCPNDCCEAIYSSVSGLKAHLASCSKGAHLAGKYRCLLCPKEFSSESGVKYHILKTHAENWFRTSADPPPKHRSQDSLVPKKEKKKNLAGGKKRGRKPKERTPEEPVAKLPPRRDDWPPGCRDKGARGSTGRKVGVSKAPEK

SEQ ID NO: 16214 - protein, 541 aa, Homo Sapiens
MPRRKQSHPQPVKCEGVKVDTEDSLDEGPGALVLESDLLLGQDLEFEEEEEEEEGDGNSDQLMGFERDSEGDSLGARPGLPYGLSDDESGGGRALSAESEVEEPARGPGEARGERPGPACQLCGGPTGEGPCCGAGGPGGGPLLPPRLLYSCRLCTFVSHYSSHLKRHMQTHSGEKPFRCGRCPYASAQLVNLTRHTRTHTGEKPYRCPHCPFACSSLGNLRRHQRTHAGPPTPPCPTCGFRCCTPRPARPPSPTEQEGAVPRRPEDALLLPDLSLHVPPGGASFLPDCGQLRGEGEGLCGTGSEPLPELLFPWTCRGCGQELEEGEGSRLGAAMCGRCMRGEAGGGASGGPQGPSDKGFACSLCPFATHYPNHLARHMKTHSGEKPFRCARCPYASAHLDNLKRHQRVHTGEKPYKCPLCPYACGNLANLKRHGRIHSGDKPFRCSLCNYSCNQSMNLKRHMLRHTGEKPFRCATCAYTTGHWDNYKRHQKVHGHGGAGGPGLSASEGWAPPHSPPSVLSSRGPPALGTAGSRAVHTDSS

SEQ ID NO: 16215 - protein, 400 aa, Homo Sapiens
MTFEDVAVEFSQWEWGQLNPAQKDLYREVMLENFRNLAILGLLVSKPYVICQLEEGGEPFMVEREISTGAHSDWKRRSKSKESMPSWGISKEELFQVVSVEKHIQDVLQFSKLKAACGCDGQLEMQQIKQERHLKQMSTIHKSATTLSRDYKWNGFGRSLGLRSVLVNQHSILMGEGSYKCDTEFRQTLGGNNSQRTHPEKKSCKCNECGKSFHFQSELRRHQRCHTGEKPYECSDCGRAFGHISSLIKHQRTHTGEKPYECSECGRAFSQSSSLVLHYRFHTGEKPYKCNECGRAFGHTSSLIKHQRTHTGEKPYECRECGRTFSQSSSLIVHYRFHTGEKPYKCNKCGRAFSQSSSLTQHYRFHTGEKPYKCNECGRAFAHTASLIKHQRSHAGKKTL

SEQ ID NO: 16216 - protein, 1163 aa, Homo Sapiens
MDRNREAEMELRRGPSPTRAGRGHEVDGDKATCHTCCICGKSFPFQSSLSQHMRKHTGEKPYKCPYCDHRASQKGNLKIHIRSHRTGTLIQGHEPEAGEAPLGEMRASEGLDACASPTKSASACNRLLNGASQADGARVLNGASQADSGRVLLRSSKKGAEGSACAPGEAKAAVQCSFCKSQFERKKDLELHVHQAHKPFKCRLCSYATLREESLLSHIERDHITAQGPGSGEACVENGKPELSPGEFPCEVCGQAFSQTWFLKAHMKKHRGSFDHGCHICGRRFKEPWFLKNHMKAHGPKTGSKNRPKSELDPIATINNVVQEEVIVAGLSLYEVCAKCGNLFTNLDSLNAHNAIHRRVEASRTRAPAEEGAEGPSDTKQFFLQCLNLRPSAAGDSCPGTQAGRRVAELDPVNSYQAWQLATRGKVAEPAEYLKYGAWDEALAGDVAFDKDRREYVLVSQEKRKREQDAPAAQGPPRKRASGPGDPAPAGHLDPRSAARPNRRAAATTGQGKSSECFECGKIFRTYHQMVLHSRVHRRARRERDSDGDRAARARCGSLSEGDSASQPSSPGSACAAADSPGSGLADEAAEDSGEEGAPEPAPGGQPRRCCFSEEVTSTELSSGDQSHKMGDNASERDTGESKAGIAASVSILENSSRETSRRQEQHRFSMDLKMPAFHPKQEVPVPGDGVEFPSSTGAEGQTGHPAEKLSDLHNKEHSGGGKRALAPDLMPLDLSARSTRDDPSNKETASSLQAALVVHPCPYCSHKTYYPEVLWMHKRIWHRVSCNSVAPPWIQPNGYKSIRSNLVFLSRSGRTGPPPALGGKECQPLLLARFTRTQVPGGMPGSKSGSSPLGVVTKAASMPKNKESHSGGPCALWAPGPDGYRQTKPCHGQEPHGAATQGPLAKPRQEASSKPVPAPGGGGFSRSATPTPTVIARAGAQPSANSKPVEKFGVPPAGAGFAPTNKHSAPDSLKAKFSAQPQGPPPAKGEGGAPPLPPREPPSKAAQELRTLATCAAGSRGDAALQAQPGVAGAPPVLHSIKQEPVAEGHEKRLDILNIFKTYIPKDFATLYQGWGVSGPGLEHRGTLRTQARPGEFVCIECGKSFHQPGHLRAHMRAHSVVFESDGPRGSEVHTTSADAPKQGRDHSNTGTVQTVPLRKGT

SEQ ID NO: 16217 - protein, 492 aa, Homo Sapiens
MAMALPMPGPQEAVVFEDVAVYFTRIEWSCLAPDQQALYRDVMLENYGNLASLGFLVAKPALISLLEQGEEPGALILQVAEQSVAKASLCTDSRMEAGIMESPLQRKLSRQAGLPGTVWGCLPWGHPVGGHPAPPHPHGGPEDGSDKPTHPRAREHSASPRVLQEDLGRPVGSSAPRYRCVCGKAFRYNSLLLRHQIIHTGAKPFQCTECGKAFKQSSILLRHQLIHTEEKPFQCGECGKAFRQSTQLAAHHRVHTRERPYACGECGKAFSRSSRLLQHQKFHTGEKPFACTECGKAFCRRFTLNEHGRIHSGERPYRCLRCGQRFIRGSSLLKHHRLHAQEGAQDGGVGQGALLGAAQRPQAGDPPHECPVCGRPFRHNSLLLLHLRLHTGEKPFECAECGKAFGRKSNLTLHQKIHTKEKPFACTECGKAFRRSYTLNEHYRLHSGERPYRCRACGRACSRLSTLIQHQKVHGREPGEDTEGRRAPCWAS

SEQ ID NO: 16218 - protein, 1483 aa, Homo Sapiens
MPSEQKQLFCDEKQTTLKKDYDVKNEIVDRSAPKPKISGSIHYALKNVKIDLPKINIPNEVLLKHEVDKYRKLFQSKQQTARKSISIKTVSCVEECTLLHKSERAEEEGVKMSAKILNFSCLKCRDNTRYSPNDLQKHFQMWHHGELPSYPCEMCNFSANDFQVFKQHRRTHRSTLVKCDICNNESVYTLLNLTKHFTSTHCVNGNFQCEKCKFSTQDVGTFVQHIHRHNEIHYKCGKCHHVCFTKGELQKHLHIHSGTFPFTCQYCSYGATRREHLVRHVITLHKEHLYAKEKLEKDKYEKRMAKTSAGLKLILKRYKIGASRKTFWKRKKINSGSDRSIEKNTQVLKKMNKTQTKSEDQSHVVQEHLSEEKDERLHCENNDKAPESESEKPTPLSTGQGNRAEEGPNASSGFMKTAVLGPTLKNVMMKNNKLAVSPNYNATFMGFKMMDGKQHIVLKLVPIKQNVCSPGSQSGAAKDGTANLQPQTLDTNGFLTGVTTELNDTVYMKAATPFSCSSSILSGKASSEKEMTLISQRNNMLQTMDYEKSVSSLSATSELVTASVNLTTKFETRDNVDFWGNHLTQSHPEVLGTTIKSPDKVNCVAKPNAYNSGDMHNYCINYGNCELPVESSNQGSLPFHNYSKVNNSNKRRRFSGTAVYENPQRESSSSKTVVQQPISESFLSLVRQESSKPDSLLASISLLNDKDGTLKAKSEIEEQYVLEKGQNIDGQNLYSNENQNLECATEKSKWEDFSNVDSPMMPRITSVFSLQSQQASEFLPPEVNQLLQDVLKIKPDVKQDSSNTPNKGLPLHCDQSFQKHEREGKIVESSKDFKVQGIFPVPPGSVGINVPTNDLNLKFGKEKQVSSIPQDVRDSEKMPRISGFGTLLKTQSDAIITQQLVKDKLRATTQNLGSFYMQSPLLNSEQKKTIIVQTSKGFLIPLNITNKPGLPVIPGNALPLVNSQGIPASLFVNKKPGMVLTLNNGKLEGVSAVKTEGAPARGTVTKEPCKTPILKVEPNNNCLTPGLCSSIGSCLSMKSSSENTLPLKGPYILKPTSSVKAVLIPNMLSEQQSTKLNISDSVKQQNEIFPKPPLYTFLPDGKQAVFLKCVMPNKTELLKPKLVQNSTYQNIQPKKPEGTPQRILLKIFNPVLNVTAANNLSVSNSASSLQKDNVPSNQIIGGEQKEPESRDALPFLLDDLMPANEIVITSTATCPESSEEPICVSDCSESRVLRCKTNCRIERNFNRKKTSKKIFSKTKTHGSKDSETAFVSRNRNCKRKCRDSYQEPPRRKATLHRKCKEKAKPEDVRETFGFSRPRLSKDSIRTLRLFPFSSKQLVKCPRRNQPVVVLNHPDADAPEVVSVMKTIAKFNGHVLKVSLSKRTINALLKPVCYNPPKTTYDDFSKRHKTFKPVSSVKERFVLKLTLKKTSKNNYQIVKTTSENILKAKFNCWFCGRVFDNQDTWAGHGQRHLMEATRDWNMLE

SEQ ID NO: 16219 - protein, 1074 aa, Homo Sapiens
MKDIGQQLYTTHLNGGHNSLTMSPKQPDANGAPRPNRQEAQTLLYQGSEAEAAMMTIATCAKCKSVHKISLQDLQKGTGKDGMYVCFQCSLGAAPPNFHFVSNNSSATHVGNKTENFSSSVNSKFKVRNFKPGKYYCDKCRFSTKDPLQYKKHTLQHEEIKFICSHCSYISYTKGEFQRHLVKHTGIFPYQCEYCDYGAIRNDYIVKHTKRVHERAGAKRPVKAVAKLEPKRTGTSKQNPELLKASNPRTTFQNKWSDQLSGFSLHANKDKMHNIMLLPEPKEYQKDVVCIPNKMTLSEPNEVNLFENKNVEVEVLSPAKEPVQPGMPLTVVAPAELVVPANCLAQLIDVKVVNGTQQLVLKLFPLEENNCLEAGRDNGGNSERMVKEKGSNEQEKVLSAEKTKSLTVDGNVGKLVGIDSFQPSVQKQLKNVKWVRSYDFIMPNSSVHNNGKSFINSETIEDFQKKNNLYPHRTAFPSVALKGHSLASVFKNSVLRSLGAASNPFPYKAAVCFAESGRNLHSSSQQLLPFAASPATCSFSGEKGLLPVSENDLESTSKVNIPVKVVSSNRKQEDNQTEEHKAVSTVGQISSQHKSEYLHINITGEDRSQQPGDKPLELKNSERTNNTNDGPVISSVFSLSSGSENVPEGIKWNSSTSKIKSIELLRRKIAQLIESCGKPSSLASNSAHRRSVGQASKGTSKATSEGIQEINVSLTGLGHSTGTLQKPPNDGGITGNRQLTHQQIYPHFADGSNRKTKSRVARKAHVATPVLIPKGAVLRVLNSSENAHIIEATCEAPVSIPCSERQLIKPVPFCPVRQADSDLQPLRSERGPIDMSPNIETPLRPKLRKESAVCSTIHRKTGLLYGQQGSSELNKQGRLLSRSLSISRNKTKQVHLSRKKNKIQAEPSRCLKDPSIFQVARQLRLIAAKPDQLIKCPRRNQPVIVLNHPDVDSPEVTNVMKVINKYKGNVLKVVLSERTRCQLGIRRHHVRLTYQNAEEASQIKRQMMLKMKLKKVHKNNYQVVDSLPDDSSQCVFKCWFCGRLYEDQEEWMSHGQRHLIEATRDWDVLSSKGK

SEQ ID NO: 16220 - protein, 540 aa, Homo Sapiens
MELLTFRDVAIEFSPEEWKCLDPAQQNLYRDVMLENYRNLVSLAVYSYYNQGILPEQGIQDSFKKATLGRYGSCGLENICLWKNWESIGEGEGQKECYNLCSQYLTTSHNKHLTVKGDKEYRIFQKKPQFLSAAPTEPCIPMNKYQHKFLKSVFCNKNQINFNHDSNISKHHSTHFLENYYNCNECEKVFYQSSKLIFPENIHIQKKPYNSNECGETSDPFSKLTQHQRIYIGESSQRCNKKCIIVFSQSHLKGHKIINTGEKSVKYKERGKAFTRGLHLGHQKIHTGEKPYKCKKCDKAFNKSSHLAQHQRIHTGEKPFKCKECGKAFNRGSYLTQHQRIHTGERAFKCEECGKAFNRGSYLTQHQRIHTGEKPFRCKECGKAFNRSSYVTQHQRMHTGEKPFKCKECGKAFNRASHLTQHQRIHTGEKHFKCKECGKAFNRGSHLTRHQRIHTGEKSFKCEECGKAFIWGSHLTQHQRVHTGEKFFKCKECGKAFTRSSHLTQHQRIHTGEKPFKCKECGKAFNRRSTLTQHQIIHTR

SEQ ID NO: 16221 - protein, 1311 aa, Homo Sapiens
MSRRKQAKPRSLKDPNCKLEDKTEDGEALDCKKRPEDGEELEDEAVHSCDSCLQVFESLSDITEHKINQCQLTDGVDVEDDPTCSWPASSPSSKDQTSPSHGEGCDFGEEEGGPGLPYPCQFCDKSFSRLSYLKHHEQSHSDKLPFKCTYCSRLFKHKRSRDRHIKLHTGDKKYHCSECDAAFSRSDHLKIHLKTHTSNKPYKCAICRRGFLSSSSLHGHMQVHERNKDGSQSGSRMEDWKMKDTQKCSQCEEGFDFPEDLQKHIAECHPECSPNEDRAALQCVYCHELFVEETSLMNHMEQVHSGEKKNSCSICSESFHTVEELYSHMDSHQQPESCNHSNSPSLVTVGYTSVSSTTPDSNLSVDSSTMVEAAPPIPKSRGRKRAAQQTPDMTGPSSKQAKVTYSCIYCNKQLFSSLAVLQIHLKTMHLDKPEQAHICQYCLEVLPSLYNLNEHLKQVHEAQDPGLIVSAMPAIVYQCNFCSEVVNDLNTLQEHIRCSHGFANPAAKDSNAFFCPHCYMGFLTDSSLEEHIRQVHCDLSGSRFGSPVLGTPKEPVVEVYSCSYCTNSPIFNSVLKLNKHIKENHKNIPLALNYIHNGKKSRALSPLSPVAIEQTSLKMMQAVGGAPARPTGEYICNQCGAKYTSLDSFQTHLKTHLDTVLPKLTCPQCNKEFPNQESLLKHVTIHFMITSTYYICESCDKQFTSVDDLQKHLLDMHTFVFFRCTLCQEVFDSKVSIQLHLAVKHSNEKKVYRCTSCNWDFRNETDLQLHVKHNHLENQGKVHKCIFCGESFGTEVELQCHITTHSKKYNCKFCSKAFHAIILLEKHLREKHCVFETKTPNCGTNGASEQVQKEEVELQTLLTNSQESHNSHDGSEEDVDTSEPMYGCDICGAAYTMETLLQNHQLRDHNIRPGESAIVKKKAELIKGNYKCNVCSRTFFSENGLREHMQTHLGPVKHYMCPICGERFPSLLTLTEHKVTHSKSLDTGNCRICKMPLQSEEEFLEHCQMHPDLRNSLTGFRCVVCMQTVTSTLELKIHGTFHMQKTGNGSAVQTTGRGQHVQKLYKCASCLKEFRSKQDLVKLDINGLPYGLCAGCVNLSKSASPGINVPPGTNRPGLGQNENLSAIEGKGKVGGLKTRCSSCNVKFESESELQNHIQTIHRELVPDSNSTQLKTPQVSPMPRISPSQSDEKKTYQCIKCQMVFYNEWDIQVHVANHMIDEGLNHECKLCSQTFDSPAKLQCHLIEHSFEGMGGTFKCPVCFTVFVQANKLQQHIFSAHGQEDKIYDCTQCPQKFFFQTELQNHTMTQHSS

SEQ ID NO: 16222 - protein, 264 aa, Homo Sapiens
MDTPSPDPLPSPLPGEEEKPLALSPPVPRGRRGRRPGGATSSNRTLKASLPRKRGRPPKSGQEPPLVQVQGVTAPVGSSGGSDLLLIDDQGVPYTVSEGSAAGPEGSGPRKAPHFCPVCLRAFPYLSDLERHSISHSELKPHQCKVCGKTFKRSSHLRRHCNIHAGLRPFRCPLCPRRFREAGELAHHHRVHSGERPYQCPICRLRFTEANTLRRHAKRKHPEAMGVPLCAPDPGSEPPWDEEGIPATAGAEEEEETEGKGEPA

SEQ ID NO: 16223 - protein, 670 aa, Homo Sapiens
MAEVVAEVAEMPTQMSPGAVEMSTPMSAEMMEMSTEVTEMTPGEALASSLFFQHHQFMCSECGSLYNTLEEVLSHQEQHMLAVSEEEALTTQNVGLEPELVPGAEGPFQCGECSQLILSPGELLAHQDAHLRESANQIQYQCWDCQELFPSPELWVAHRKAQHLSATVAEPPVPPPLPPPTPLPPPSPPSEVKMEPYECPECSTLCATPEEFLEHQGTHFDSLEKEERNGLEEEEEDDEEDEEDDEEMEDEEAMAEVGDDAVGGDESTAGWAQGCGDCPQHQPSAGARRQHRRTAHSPASATHPFHCSQCQRSFSSANRLQAHGRAHVGGTHECTTCSKVFKKAASLEQHLRLHRGEARYLCVDCGRGFGTELTLVAHRRAHTANPLHRCRCGKTFSNMTKFLYHRRTHAGKSGAPPTGATAPPAPAEPTPPPPPPAPPAQLPCPQCSKSFASASRLSRHRRAVHGPPERRHRCGVCGKGFKKLIHVRNHLRTHTGERPFQCHSCGKTFASLANLSRHQLTHTGARPYQCLDCGKRFTQSSNLQQHRRLHLRPVAFARAPRLPITGLYNKSPYYCGTCGRWFRAMAGLRLHQRVHARARTLTLQPPRSPSPAPPPPPEPQQTIMCTELGETIAIIETSQPLALEDTLQLCQAALGASEAGGLLQLDTAFV

SEQ ID NO: 16224 - protein, 609 aa, Homo Sapiens
MAVGLCKAMSQGLVTFRDVALDFSQEEWEWLKPSQKDLYRDVMLENYRNLVWLGLSISKPNMISLLEQGKEPWMVERKMSQGHCADWESWCEIEELSPKWFIDEDEISQEMVMERLASHGLECSSFREAWKYKGEFELHQGNAERHFMQVTAVKEISTGKRDNEFSNSGRSIPLKSVFLTQQKVPTIQQVHKFDIYDKLFPQNSVIIEYKRLHAEKESLIGNECEEFNQSTYLSKDIGIPPGEKPYESHDFSKLLSFHSLFTQHQTTHFGKLPHGYDECGDAFSCYSFFTQPQRIHSGEKPYACNDCGKAFSHDFFLSEHQRTHIGEKPYECKECNKAFRQSAHLAQHQRIHTGEKPFACNECGKAFSRYAFLVEHQRIHTGEKPYECKECNKAFRQSAHLNQHQRIHTGEKPYECNQCGKAFSRRIALTLHQRIHTGEKPFKCSECGKTFGYRSHLNQHQRIHTGEKPYECIKCGKFFRTDSQLNRHHRIHTGERPFECSKCGKAFSDALVLIHHKRSHAGEKPYECNKCGKAFSCGSYLNQHQRIHTGEKPYECSECGKAFHQILSLRLHQRIHAGEKPYKCNECGNNFSCVSALRRHQRIHNRETL

SEQ ID NO: 16225 - protein, 628 aa, Homo Sapiens
MALTQGPLKFMDVAIEFSQEEWKCLDPAQRTLYRDVMLENYRNLVSLGICLPDLSVTSMLEQKRDPWTLQSEEKIANDPDGRECIKGVNTERSSKLGSNAGNKPCKNQLGFTFQLHLSDLQLFQAERKISGCKHFEKPVSDNSSVSPLEKISSSVKSHLLNKYRNNFDHAPLLPQEQKAHIREKAYKCNEHGQVFRASASLTNQVIHNADNPYKCSECGKVFSCSSKLVIHRRMHTGEKPYKCHECGKLFSSNSNLSQHQRIHTGEKPYKCHECDKVFRSSSKLAQHQRIHTGEKPYKCHECDKVFNQIAHLVRHQKIHTGEKPYSCNKCGKVFSRHSYLAEHQTVHTGEKPYKCEECGKAFSVRSSLITHQLIHTGRKPYKCKECDKVFGRKCFLTSHQRIHTRERPYGCSQCGKIFSQKSDLIRHRKTHTDEKPYKCNKCGTAFREFSDLTAHFLIHSGEKPYECKECGKVFRYKSSLTSHHRIHTGEKPYKCNRCGKVFSRSSNLVCHQKIHTGEKPYKCNQCGKVFNQASYLTRHQIIHTGERPYRCSKCGKAFRGCSGLTAHLAIHTEKKSHECKECGKIFTQKSSLTNHHRIHIGEKPYKCTLCSKVFSHNSDLAQHQRVHS

SEQ ID NO: 16226 - protein, 563 aa, Homo Sapiens
MANSSFIGDHVHGAPHAVMPEVEFPDQFFTVLTMDHELVTLRDVVINFSQEEWEYLDSAQRNLYWDVMMENYSNLLSLDLESRNETKHLSVGKDIIQNTGSQWEVMESSKLCGLEGSIFRNDWQSKSKIDLQGPEVGYFSQMKIISENVPSYKTHESLTLPRRTHDSEKPYEYKEYEKVFSCDLEFDEYQKIHTGGKNYECNQCWKTFGIDNSSMLQLNIHTGVKPCKYMEYGNTCSFYKDFNVYQKIHNEKFYKCKEYRRTFERVGKVTPLQRVHDGEKHFECSFCGKSFRVHAQLTRHQKIHTDEKTYKCMECGKDFRFHSQLTEHQRIHTGEKPYKCMHCEKVFRISSQLIEHQRIHTGEKPYACKECGKAFGVCRELARHQRIHTGKKPYECKACGKVFRNSSSLTRHQRIHTGEKPYKCKECEKAFGVGSELTRHERIHSGQKPYECKECGKFFRLTSALIQHQRIHSGEKPYECKVCGKAFRHSSALTEHQRIHTGEKPYECKACGKAFRHSSSFTKHQRIHTDDKPYECKECGNSFSVVGHLTCQPKIYTGEKSFD

SEQ ID NO: 16227 - protein, 599 aa, Homo Sapiens
MAAALRAPTQQVFVAFEDVAIYFSQEEWELLDEMQRLLYRDVMLENFAVMASLGCWCGAVDEGTPSAESVSVEELSQGRTPKADTSTDKSHPCEICTPVLRDILQMIELHASPCGQKLYLGGASRDFWMSSNLHQLQKLDNGEKLFKVDGDQASFMMNCRFHVSGKPFTFGEVGRDFSATSGLLQHQVTPTIERPHSRIRHLRVPTGRKPLKYTESRKSFREKSVFIQHQRADSGERPYKCSECGKSFSQSSGFLRHRKAHGRTRTHECSECGKSFSRKTHLTQHQRVHTGERPYDCSECGKSFRQVSVLIQHQRVHTGERPYECSECGKSFSHSTNLYRHRSAHTSTRPYECSECGKSFSHSTNLFRHWRVHTGVRPYECSECGKAFSCNIYLIHHQRFHTGERPYVCSECGKSFGQKSVLIQHQRVHTGERPYECSECGKVFSQSSGLFRHRRAHTKTKPYECSECEKSFSCKTDLIRHQTVHTGERPYECSVCGKSFIRKTHLIRHQTVHTNERPYECDECGKSYSQSSALLQHRRVHTGERPYECRECGKSFTRKNHLIQHKTVHTGERPYECSECGKSFSQSSGLLRHRRVHVQ

SEQ ID NO: 16228 - protein, 1301 aa, Homo Sapiens
MTMGDMKTPDFDDLLAAFDIPDMVDPKAAIESGHDDHESHMKQNAHGEDDSHAPSSSDVGVSVIVKNVRNIDSSEGGEKDGHNPTGNGLHNGFLTASSLDSYSKDGAKSLKGDVPASEVTLKDSTFSQFSPISSAEEFDDDEKIEVDDPPDKEDMRSSFRSNVLTGSAPQQDYDKLKALGGENSSKTGLSTSGNVEKNKAVKRETEASSINLSVYEPFKVRKAEDKLKESSDKVLENRVLDGKLSSEKNDTSLPSVAPSKTKSSSKLSSCIAAIAALSAKKAASDSCKEPVANSRESSPLPKEVNDSPRAADKSPESQNLIDGTKKPSLKQPDSPRSISSENSSKGSPSSPAGSTPAIPKVRIKTIKTSSGEIKRTVTRVLPEVDLDSGKKPSEQTASVMASVTSLLSSPASAAVLSSPPRAPLQSAVVTNAVSPAELTPKQVTIKPVATAFLPVSAVKTAGSQVINLKLANNTTVKATVISAASVQSASSAIIKAANAIQQQTVVVPASSLANAKLVPKTVHLANLNLLPQGAQATSELRQVLTKPQQQIKQAIINAAASQPPKKVSRVQVVSSLQSSVVEAFNKVLSSVNPVPVYIPNLSPPANAGITLPTRGYKCLECGDSFALEKSLTQHYDRRSVRIEVTCNHCTKNLVFYNKCSLLSHARGHKEKGVVMQCSHLILKPVPADQMIVSPSSNTSTSTSTLQSPVGAGTHTVTKIQSGITGTVISAPSSTPITPAMPLDEDPSKLCRHSLKCLECNEVFQDETSLATHFQQAADTSGQKTCTICQMLLPNQCSYASHQRIHQHKSPYTCPECGAICRSVHFQTHVTKNCLHYTRRVGFRCVHCNVVYSDVAALKSHIQGSHCEVFYKCPICPMAFKSAPSTHSHAYTQHPGIKIGEPKIIYKCSMCDTVFTLQTLLYRHFDQHIENQKVSVFKCPDCSLLYAQKQLMMDHIKSMHGTLKSIEGPPNLGINLPLSIKPATQNSANQNKEDTKSMNGKEKLEKKSPSPVKKSMETKKVASPGWTCWECDCLFMQRDVYISHVRKEHGKQMKKHPCRQCDKSFSSSHSLCRHNRIKHKGIRKVYACSHCPDSRRTFTKRLMLEKHVQLMHGIKDPDLKEMTDATNEEETEIKEDTKVPSPKRKLEEPVLEFRPPRGAITQPLKKLKINVFKVHKCAVCGFTTENLLQFHEHIPQHKSDGSSYQCRECGLCYTSHVSLSRHLFIVHKLKEPQPVSKQNGAGEDNQQENKPSHEDESPDGAVSDRKCKVCAKTFETEAALNTHMRTHGMAFIKSKRMSSAEK

SEQ ID NO: 16229 - protein, 674 aa, Homo Sapiens
MALTQGQLSFSDVAIEFSQEEWKCLDPGQKALYRDVMLENYRNLVSLGEDNVRPEACICSGICLPDLSVTSMLEQKRDPWTLQSEVKIINNPDGRECIKGVNTEKSSKLGSSAGNKSLKNQHGLTLQLHLTEWQPFQAVRNIYGCKHVEKSISDNSSVSPVQISFFSVKTHIFNNYRNDFLFSTLLPQEQKVHIREKPYGCNEHGKVFRVSSSLTNRQVIHIADKTYKCSDCGEIFSSNSNFAQHQRIHTGEKPYKYNECGKVFNQNSHLAQHQKIHTGQKPYNNKECGKVFSHHAYLAQHRKIHTGEKPYKCSECGKAFSVCSSLTAHLVIHTGEKPYDCKECGKVFRHKSSLTTHQTVHTGERPYKCNECGKGFSRIAFLARHRKVHTGEKPYKCNECGKVFIGNSRLARHRKIHTGGRRYKCNECGKAFRTCSDLTAHLLIHTGEKPYECIDCGKVFRHKSSLTYHCRIHTGEKPYKCNECGKVFSQNSNLQRHRKIHTGEKLYKCNECGKVFRQNSHLAQHRDIHTGEKPYSCNECGKVFRRNSHLVRHRNVHTGEKPYSCNECGKVFSRNSHLARHRNIHTGEKPHSCNECGKVFSRNSHLARHRKIHTGEKLYKCNECSKVFSRNSRLAQHRNIHTGVKPYSCNECGKVFSKNSILVQHCSIHTREKP

SEQ ID NO: 16230 - protein, 1300 aa, Homo Sapiens
MEEASLCLGVSSAEPEAEPHLSGPVLNGQYAMSQKLHQITSQLSHAFPELHPRPNPEEKPPASLEEKAHVPMSGQPMGSQMALLANQLGREVDTSLNGRVDLQQFLNGQNLGIMSQMSDIEDDARKNRKYPCPLCGKRFRFNSILSLHMRTHTGEKPFKCPYCDHRAAQKGNLKIHLRTHKLGNLGKGRGRVREENRLLHELEERAILRDKQLKGSLLQPRPDLKPPPHAQQAPLAACTLALQANHSVPDVAHPVPSPKPASVQEDAVAPAAGFRCTFCKGKFKKREELDRHIRILHKPYKCTLCDFAASQEEELISHVEKAHITAESAQGQGPNGGGEQSANEFRCEVCGQVFSQAWFLKGHMRKHKDSFEHCCQICGRRFKEPWFLKNHMKVHLNKLSVKNKSPSDPEVPVPMGGMSQEAHANLYSRYLSCLQSGFMTPDKAGLSEPSQLYGKGELPMKEKEALGKLLSPISSMAHGVPEGDKHSLLGCLNLVPPLKSSCIERLQAAAKAAEMDPVNSYQAWQLMARGMAMEHGFLSKEHPLQRNHEDTLANAGVLFDKEKREYVLVGADGSKQKMPADLVHSTKVGSQRDLPSKLDPLESSRDFLSHGLNQTLEYNLQGPGNMKEKPTECPDCGRVFRTYHQVVVHSRVHKRDRKGEEDGLHVGLDERRGSGSDQESQSVSRSTTPGSSNVTEESGVGGGLSQTGSAQEDSPHPSSPSSSDIGEEAGRSAGVQQPALLRDRSLGSAMKDCPYCGKTFRTSHHLKVHLRIHTGEKPYKCPHCDYAGTQSASLKYHLERHHRERQNGAGPLSGQPPNQDHKDEMSSKASLFIRPDILRGAFKGLPGIDFRGGPASQQWTSGVLSSGDHSGQATGMSSEVPSDALKGTDLPSKSTHFSEIGRAYQSIVSNGVNFQGSLQAFMDSFVLSSLKKEKDMKDKALADPPSMKVHGVDGGEEKPSGKSSQRKSEKSQYEPLDLSVRPDAASLPGSSVTVQDSIAWHGCLFCAFTTSSMELMALHLQANHLGKAKRKDNTIGVTVNCKDQAREASKMALLPSLQSNKDLGLSNMISSLDSASEKMAQGQLKETLGEQKSGAWTGHVDPAFCNFPSDFYKQFGVYPGMVGSGASSSCPNKEPDGKAHSEEDVPILIPETTSKNTTDDLSDIASSEDMDSSKGENNDEEDVETEPEMMTKPLSALSKDSSSDGGDSLQPTGTSQPVQGLVSPLSQAPEKQWHSQGLLQAQDPLAGLPKPERGPQSLDKPMNMLSVLRAYSSDGLAAFNGLASSTANSGCIKRPDLCGK

SEQ ID NO: 16231 - protein, 660 aa, Homo Sapiens
MAHALVTFRDVAIDFSQKEWECLDTTQRKLYRDVMLENYNNLVSLGYSGSKPDVITLLEQGKEPCVVARDVTGRQCPGLLSRHKTKKLSSEKDIHEISLSKESIIEKSKTLRLKGSIFRNEWQNKSEFEGQQGLKERSISQKKIVSKKMSTDRKRPSFTLNQRIHNSEKSCDSHLVQHGKIDSDVKHDCKECGSTFNNVYQLTLHQKIHTGEKSCKCEKCGKVFSHSYQLTLHQRFHTGEKPYECQECGKTFTLYPQLNRHQKIHTGKKPYMCKKCDKGFFSRLELTQHKRIHTGKKSYECKECGKVFQLIFYFKEHERIHTGKKPYECKECGKAFSVCGQLTRHQKIHTGVKPYECKECGKTFRLSFYLTEHRRTHAGKKPYECKECGKSFNVRGQLNRHKTIHTGIKPFACKVCEKAFSYSGDLRVHSRIHTGEKPYECKECGKAFMLRSVLTEHQRLHTGVKPYECKECGKTFRVRSQISLHKKIHTDVKPYKCVRCGKTFRFGFYLTEHQRIHTGEKPYKCKECGKAFIRRGNLKEHLKIHSGLKPYDCKECGKSFSRRGQFTEHQKIHTGVKPYKCKECGKAFSRSVDLRIHQRIHTGEKPYECKQCGKAFRLNSHLTEHQRIHTGEKPYECKVCRKAFRQYSHLYQHQKTHNVI

SEQ ID NO: 16232 - protein, 1346 aa, Homo Sapiens
MDQYSLGDEGALPSEMHLPSFSESQGLNCSDTLNRDLGPNTRGFLYAGLSGLDPDPSLPTPDMSSEVLEDNLDTLSLYSGKDSDSVKLLEEYADSESQASLQDLGLGVLKAKEADEGGRATSGSARKGKRQHSSPQNPLLDCSLCGKVFSSASSLSKHYLTHSQERKHVCKICSKAFKRQDHLTGHMLTHQKTKPFVCIEQGCSKSYCDYRSLRRHYEVHHGLCILKEAPPEEEACGDSPHAHESAGQPPPSSLRSLVPPEARSPGSLLPHRDLLRRIVSSIVHQKTPSPGPAPAGASDSEGRNTACPCPASSGSSSCTPAGPHAAPAALDTELPEEPCLPQKEPATDVFTAPNSRAAENGAPDPPEPEPDTALLQARSTAECWPEGGSVPACLPLFRGQTVPASSQPSSHSFQWLRNLPGCPKSKGNNVFVVHKPSAVPSREGSESGPGPSSGSPSEESPPGPGGGLEDALPFPAALLRVPAEAPSDPRSASGEDDPCAPKKVKVDCDSFLCQNPGEPGLQEAQKAGGLPADASPLFRQLFLKSQEPLVSHEQMQVFQMITKSQRIFSHAQVAAVSSQLPAPEGKPAALRPLQGPWPQQPPPLAPAVDSLHAGPGNPEAEGSPARRRKTTPGVPREASPGSTRRDAKGGLKVAAVPTPLAAPSLDPSRNPDISSLAKQLRSSKGTLDLEDIFPSTGQRQTQLGGEEPPGASLPGKQAPAENGAASRITKGEKGPACSRGGGYRLLGNPRAPRFSGFRKEKAKMDMCCAASPSQVAMASFSSAGPPADPSKSKLTIFSRIQGGNIYRLPHPVKEENVAGRGNQQNGSPTDWTKPRSTFVCKNCSQMFYTEKGLSSHMCFHSDQWPSPRGKQEPQVFGTEFCKPLRQVLRPEGDRHSPPGTKKPLDPTAAAPLVVPQSIPVVPVTRHIGSMAMGQEKDGEERDSKESSQQRKRKKRPPPSTAGEPGPAGCHQSRLRSPMFLVDCLLKGLFQCSPYTPPPMLSPIREGSGVYFNTLCSTSTQASPDQLISSMLDQVDGSFGICVVKDDTKISIEPHINIGSRFQAEIPELQERSLAGTDEHVASLVWKPWGDMMISSETQDRVTELCNVACSSVMPGGGTNLELALHCLHEAQGNVQVALETLLLRGPHKPRTHLLADYRYTGSDVWTPIEKRLFKKAFYAHKKDFYLIHKMIQTKTVAQCVEYYYIWKKMIKFDCGRAPGLEKRVKREPEEVERTEEKVPCSPRERPSHHPTPKLKTKSYRRESILSSSPNAGSKRTPELLGSAESQGIFPCRECERVFDKIKSRNAHMKRHRLQDHVEPIIRVKWPVKPFQLKEEELGADIGPLQW

SEQ ID NO: 16233 - protein, 170 aa, Homo Sapiens
MLENYQNLVWLGLSISKSVISLLEKRKLPWIMAKEEIRGPLPGYFKVSEMTISQEPKAKTRTLFGKDVPGAEIKELSAKRAINEVLSQFDTVIKCTRNVCKECGNLYCHNMQLTLHKRNHTQKKCNQCLDCGKYFTRQSTLIQHQRIHTGERPYKCNECIKTFNQRAHLT

SEQ ID NO: 16234 - protein, 600 aa, Homo Sapiens
MAASAQVSVTFEDVAVTFTQEEWGQLDAAQRTLYQEVMLETCGLLMSLGCPLFKPELIYQLDHRQELWMATKDLSQSSYPGDNTKPKTTEPTFSHLALPEEVLLQEQLTQGASKNSQLGQSKDQDGPSEMQEVHLKIGIGPQRGKLLEKMSSERDGLGSDDGVCTKITQKQVSTEGDLYECDSHGPVTDALIREEKNSYKCEECGKVFKKNALLVQHERIHTQVKPYECTECGKTFSKSTHLLQHLIIHTGEKPYKCMECGKAFNRRSHLTRHQRIHSGEKPYKCSECGKAFTHRSTFVLHHRSHTGEKPFVCKECGKAFRDRPGFIRHYIIHTGEKPYECIECGKAFNRRSYLTWHQQIHTGVKPFECNECGKAFCESADLIQHYIIHTGEKPYKCMECGKAFNRRSHLKQHQRIHTGEKPYECSECGKAFTHCSTFVLHKRTHTGEKPYECKECGKAFSDRADLIRHFSIHTGEKPYECVECGKAFNRSSHLTRHQQIHTGEKPYECIQCGKAFCRSANLIRHSIIHTGEKPYECSECGKAFNRGSSLTHHQRIHTGRNPTIVTDVGRPFMTAQTSVNIQELLLGKEFLNITTEENLW

SEQ ID NO: 16235 - protein, 715 aa, Homo Sapiens
MEARSMLVPPQASVCFEDVAMAFTQEEWEQLDLAQRTLYREVTLETWEHIVSLGLFLSKSDVISQLEQEEDLCRAEQEAPRDWKATLEENRLNSEKDRAREELSHHVEVYRSGPEEPPSLVLGKVQDQSNQLREHQENSLRFMVLTSERLFAQREHCELELGGGYSLPSTLSLLPTTLPTSTGFPKPNSQVKELKQNSAFINHEKNGADGKHCESHQCARAFCQSIYLSKLGNVETGKKNPYEYIVSGDSLNYGSSLCFHGRTFSVKKSDDCKDYGNLFSHSVSLNEQKPVHFGKSQYECDECRETCSESLCLVQTERSGPGETPFRCEERCAAFPMASSFSDCNIIQTTEKPSVCNQCGKSFSCCKLIHQRTHTGEKPFECTQCGKSFSQSYDLVIHQRTHTGEKPYECDLCGKSFTQRSKLITHQRIHTGEKPYQCIECRKSFRWNSNLIVHQRIHTGEKPYECTHCGKSFSQSYELVTHKRTHTGEKPFKCTQCGKSFSQKYDLVVHQRTHTGEKPYECNLCGKSFSQSSKLITHQRIHTGEKPYQCIECGKSFRWNSNLVIHQRIHTGEKPYDCTHCGKSFSQSYQLVAHKRTHTGEKPYECNECGKAFNRSTQLIRHLQIHTGEKPYKCNQCNKAFARSSYLVMHQRTHTGEKPFECSQCGKAFSGSSNLLSHHRIHSGEKPYECSDCGKSFRQQSQLVVHRRTHTGEKP

SEQ ID NO: 16236 - protein, 836 aa, Homo Sapiens
MQVDPPLHGPPNDFLIFQIIPLHSLSIMPRFLWILCFSMEETQGELTSSCGSKTMANVSLAFRDVSIDLSQEEWECLDAVQRDLYKDVMLENYSNLVSLGYTIPKPDVITLLEQEKEPWIVMREGTRNWFTDLEYKYITKNLLSEKNVCKIYLSQLQTGEKSKNTIHEDTIFRNGLQCKHEFERQERHQMGCVSQMLIQKQISHPLHPKIHAREKSYECKECRKAFRQQSYLIQHLRIHTGERPYKCMECGKAFCRVGDLRVHHTIHAGERPYECKECGKAFRLHYHLTEHQRIHSGVKPYECKECGKAFSRVRDLRVHQTIHAGERPYECKECGKAFRLHYQLTEHQRIHTGERPYECKVCGKTFRVQRHISQHQKIHTGVKPYKCNECGKAFSHGSYLVQHQKIHTGEKPYECKECGKSFSFHAELARHRRIHTGEKPYECRECGKAFRLQTELTRHHRTHTGEKPYECKECGKAFICGYQLTLHLRTHTGEIPYECKECGKTFSSRYHLTQHYRIHTGEKPYICNECGKAFRLQGELTRHHRIHTCEKPYECKECGKAFIHSNQFISHQRIHTSESTYICKECGKIFSRRYNLTQHFKIHTGEKPYICNECGKAFRFQTELTQHHRIHTGEKPYKCTECGKAFIRSTHLTQHHRIHTGEKPYECTECGKTFSRHYHLTQHHRGHTGEKPYICNECGNAFICSYRLTLHQRIHTGELPYECKECGKTFSRRYHLTQHFRLHTGEKPYSCKECGNAFRLQAELTRHHIVHTGEKPYKCKECGKAFSVNSELTRHHRIHTGEKPYQCKECGKAFIRSDQLTLHQRNHISEEVLCIM

SEQ ID NO: 16237 - protein, 402 aa, Homo Sapiens
MAEMNPAQGHVVFEDVAIYFSQEEWGHLDEAQRLLYRDVMLENLALLSSLGCCHGAEDEEAPLEPGVSVGVSQVMAPKPCLSTQNTQPCETCSSLLKDILRLAEHDGTHPEQGLYTCPAHLHQHQKEQIREKLSRGDGGRPTFVKNHRVHMAGKTFLCSECGKAFSHKHKLSDHQKIHTGERTYKCSKCGILFMERSTLNRHQRTHTGERPYECNECGKAFLCKSHLVRHQTIHSGERPYECSECGKLFMWSSTLITHQRVHTGKRPYGCSECGKFFKCNSNLFRHYRIHTGKRSYGCSECGKFFMERSTLSRHQRVHTGERPYECNECGKFFSLKSVLIQHQRVHTGERPYECSECGKAFLTKSHLICHQTVHTAAKQCSECGKFFRYNSTLLRHQKVHTG

SEQ ID NO: 16238 - protein, 533 aa, Homo Sapiens
MNLTEGRVVFEDVAIYFSQEEWGHLDEAQRLLYRDVMLENLALLSSLGSWHGAEDEEAPSQQGFSVGVSEVTASKPCLSSQKVHPSETCGPPLKDILCLVEHNGIHPEQHIYICEAELFQHPKQQIGENLSRGDDWIPSFGKNHRVHMAEEIFTCMEGWKDLPATSCLLQHQGPQSEWKPYRDTEDREAFQTGQNDYKCSECGKTFTCSYSFVEHQKIHTGERSYECNKCGKFFKYSANFMKHQTVHTSERTYECRECGKSFMYNYRLMRHKRVHTGERPYECNTCGKFFRYSSTFVRHQRVHTGERPYECRECGKFFMDSSTLIKHQRVHTGERPYKCNDCGKFFRYISTLIRHQRIHTGERPYECSVCGELFRYNSSLVKHWRNHTGERPYKCSECGKSFRYHCRLIRHQRVHTGERPYECSECGKFFRYNSNLIKHWRNHTGERPYECRECGKAFSHKHILVEHQKIHSGERPYECSECQKAFIRKSHLVHHQKIHSEERLVCSMNVGNSLAKTPTSLNIRDFTMEKVYH

SEQ ID NO: 16239 - protein, 640 aa, Homo Sapiens
MAEAALVITPQIPMVTEEFVKPSQGHVTFEDIAVYFSQEEWGLLDEAQRCLYHDVMLENFSLMASVGCLHGIEAEEAPSEQTLSAQGVSQARTPKLGPSIPNAHSCEMCILVMKDILYLSEHQGTLPWQKPYTSVASGKWFSFGSNLQQHQNQDSGEKHIRKEESSALLLNSCKIPLSDNLFPCKDVEKDFPTILGLLQHQTTHSRQEYAHRSRETFQQRRYKCEQVFNEKVHVTEHQRVHTGEKAYKRREYGKSLNSKYLFVEHQRTHNAEKPYVCNICGKSFLHKQTLVGHQQRIHTRERSYVCIECGKSLSSKYSLVEHQRTHNGEKPYVCNVCGKSFRHKQTFVGHQQRIHTGERPYVCMECGKSFIHSYDRIRHQRVHTGEGAYQCSECGKSFIYKQSLLDHHRIHTGERPYECKECGKAFIHKKRLLEHQRIHTGEKPYVCIICGKSFIRSSDYMRHQRIHTGERAYECSDCGKAFISKQTLLKHHKIHTRERPYECSECGKGFYLEVKLLQHQRIHTREQLCECNECGKVFSHQKRLLEHQKVHTGEKPCECSECGKCFRHRTSLIQHQKVHSGERPYNCTACEKAFIYKNKLVEHQRIHTGEKPYECGKCGKAFNKRYSLVRHQKVHITEEP

SEQ ID NO: 16240 - protein, 422 aa, Homo Sapiens
MAETKDAAQMLVTFKDVAVTFTREEWRQLDLAQRTLYREVMLETCGLLVSLGHRVPKPELVHLLEHGQELWIVKRGLSHATCAGDRAQVHTREPTTYPPVLSERAFLRGSLTLESSTSSDSRLGRARDEEGLLEMQKGKVTPETDLHKETHLGKVSLEGEGLGTDDGLHSRALQEWLSADVLHECDSQQPGKDALIHAGTNPYKCKQCGKGFNRKWYLVRHQRVHTGMKPYECNACGKAFSQSSTLIRHYLIHTGEKPYKCLECGKAFKRRSYLMQHHPIHTGEKPYECSQCRKAFTHRSTFIRHNRTHTGEKPFECKECEKAFSNRAHLIQHYIIHTGEKPYDCMACGKAFRCSSELIQHQRIHTGEKPYECTQCGKAFHRSTYLIQHSVIHTGEMPYKCIECGKAFKRRSHLLQHQRVHT

SEQ ID NO: 16241 - protein, 407 aa, Homo Sapiens
MAAAALRFPVQGTVTFEDVAVKFTQEEWNLLSEAQRCLYRDVTLENLALMSSLGCWCGVEDEAAPSKQSIYIQRETQVRTPMAGVSPKKAHPCEMCGPILGDILHVADHQGTHHKQKLHRCEAWGNKLYDSGNFHQHQNEHIGEKPYRGSVEEALFAKRCKLHVSGESSVFSESGKDFLLRSGLLQQEATHTGKSNSKTECVSLFHGGKSHYSCGGCMKHFSTKDILSQHERLLPTEEPSVWCECGKSSSKYDSFSNHQGVHTREKPYTCGICGKLFNSKSHLLVHQRIHTGEKPYECEVCQKFFRHKYHLIAHQRVHTGERPYECSDCGKSFTHSSTFRVHKRVHTGQKPYECSECGKSFAESSSLTKHRRVHTGEKPYGCSECEKKFRQISSLRHHQRVHKRKGL

SEQ ID NO: 16242 - protein, 538 aa, Homo Sapiens
MVTCAHLGRRARLPAAQPSACPGTCFSQEERMAAGYLPRWSQELVTFEDVSMDFSQEEWELLEPAQKNLYREVMLENYRNVVSLEALKNQCTDVGIKEGPLSPAQTSQVTSLSSWTGYLLFQPVASSHLEQREALWIEEKGTPQASCSDWMTVLRNQDSTYKKVALQEEPASGINMIKLIREDGGWKQLEDSHEDPQGLLSQKASLHVVAVPQEKATAWHGFGENGNLSPALVLSQGSSKGNHLCGSELDITSLASDSVLNHHQLGYADRRPCESNECGNAIRQNSHFIQHGGKMFVYLENGQSLNHGMALTIHNKINTAEKPFECHQCGKVFNRRHSLSEHQRIHTGEKPYECQECGRAFTHSSTLTRHLRTHTGEKPYGCGECGKAFNRISSLTQHQRIHTGEKPYKCEDCGKSFCQSSYLILHKRTHTGEKPYECSECGKAFSDRSSLNQHERTHTGENPYECKQCGRAFSQRSSLVRHERTHTGEKPYRCQECGKAFSQSSSLVTHQKTHSSQKTYKIIDCGKAFYQNRHLIGY

SEQ ID NO: 16243 - protein, 628 aa, Homo Sapiens
MDSVVFEDVAVDFTLEEWALLDSAQRDLYRDVMLETFQNLASVDDETQFKASGSVSQQDIYGEKIPKESKIATFTRNVSWASVLGKIWDSLSIEDQTTNQGRNLSRNHGLERLCESNDQCGEALSQIPHLNLYKKIPPGVKQYEYNTYGKVFMHRRTSLKSPITVHTGHKPYQCQECGQAYSCRSHLRMHVRTHNGERPYVCKLCGKTFPRTSSLNRHVRIHTAEKTYECKQCGKAFIDFSSLTSHLRSHTGEKPYKCKECGKAFSYSSTFRRHTITHTGEKPYKCKECAEAFSYSSTFRRHMISHTGEKPHKCKECGEAFSYSSAFRRHMITHTGEKPYECKQCGKTFIYLQSFRRHERIHTGEKPYECKQCGKTFIYPQSFRRHERTHGGEKPYECNQCGKAFSHPSSFRGHMRVHTGEKPYECKQCGKTFNWPISLRKHMRTHTREKPYECKQCGKAFSLSACFREHVRMHPEDKSYECKLCGKAFYCHISLQKHMRRHTAEKLYKCKQCGKAFSWPELLQQHVRTHTVEKPYECKECGKVFKWPSSLPIHMRLHTGEKPYQCKHCGKAFNCSSSLRRHVRIHTTEKQYKCNVGHPPANEFMCSASEKSHQERDLIKVVNMVLPL

SEQ ID NO: 16244 - protein, 456 aa, Homo Sapiens
MDTVVFEDVVVDFTLEEWALLNPAQRKLYRDVMLETFKHLASVDNEAQLKASGSISQQDTSGEKLSLKQKIEKFTRKNIWASLLGKNWEEHSVKDKHNTKERHLSRNPRVERPCKSSKGNKRGRTFRKTRNCNRHLRKNCCTSVRRYECSQCGKLFTHSSSLIRHKRAHSGQKLYKCKECGKAFSRPSYLQTHEKTHSGEKPYACQSCGKTFLRSHSLTEHVRTHTGEKPYECGQCGKGFSCPKSFRAHVMMHAGGRPYECKHCGKAFRCQKSFRVHMIMHAGGRPYECKQCGKAYCWATSFQRHVRIHNGEKPYKCGKCGKAFGWPSSLHKHARTHAKKKPVSGGSVGKSSARPRPSTDVKSQTREKVYKCETCGKTYGWSSSLHKHERKHTGEKPVNAASVGKPSGGLCSSKNVRTQIGQKPSKCEKCGKAFSCPKAFQGHVRSHTGKKSCTSK

SEQ ID NO: 16245 - protein, 423 aa, Homo Sapiens
MAAVVLPPTAASQREGHTEGGELVNELLKSWLKGLVTFEDVAVEFTQEEWALLDPAQRTLYRDVMLENCRNLASLGNQVDKPRLISQLEQEDKVMTEERGILSGTCPDVENPFKAKGLTPKLHVFRKEQSRNMKMERNHLGATLNECNQCFKVFSTKSSLTRHRKIHTGERPYGCSECGKSYSSRSYLAVHKRIHNGEKPYECNDCGKTFSSRSYLTVHKRIHNGEKPYECSDCGKTFSNSSYLRPHLRIHTGEKPYKCNQCFREFRTQSIFTRHKRVHTGEGHYVCNQCGKAFGTRSSLSSHYSIHTGEYPYECHDCGRTFRRRSNLTQHIRTHTGEKPYTCNECGKSFTNSFSLTIHRRIHNGEKSYECSDCGKSFNVLSSVKKHMRTHTGKKPYECNYCGKSFTSNSYLSVHTRMHNRQM

SEQ ID NO: 16246 - protein, 402 aa, Homo Sapiens
MAAVILPSTAAPSSLFPASQQKGHTQGGELVNELLTSWLRGLVTFEDVAVEFTQEEWALLDPAQRTLYRDVMLENCRNLASLGCRVNKPSLISQLEQDKKVVTEERGILPSTCPDLETLLKAKWLTPKKNVFRKEQSKGVKTERSHRGVKLNECNQCFKVFSTKSNLTQHKRIHTGEKPYDCSQCGKSFSSRSYLTIHKRIHNGEKPYECNHCGKAFSDPSSLRLHLRIHTGEKPYECNQCFHVFRTSCNLKSHKRIHTGENHHECNQCGKAFSTRSSLTGHNSIHTGEKPYECHDCGKTFRKSSYLTQHVRTHTGEKPYECNECGKSFSSSFSLTVHKRIHTGEKPYECSDCGKAFNNLSAVKKHLRTHTGEKPYECNHCGKSFTSNSYLSVHKRIHNRWI

SEQ ID NO: 16247 - protein, 538 aa, Homo Sapiens
MVAGWLTNYSQDSVTFEDVAVDFTQEEWTLLDQTQRNLYRDVMLENYKNLVAVDWESHINTKWSAPQQNFLQGKTSSVVEMERNHFGEELFDFNQCEKALSEHSCLKTHRRTYFRKKTCECNQCEKAFRKPSIFTLHKKTDIGEELPNCNQCETAFSQHLHLVCKKTSQNLHLVCKKTHTQEKPYKCSDCEKGLPSSSHLRECVRIYGGERPYTHKEYVETFSHSTALFVHMQTQDGEKFYECKACGKPFTESSYLTQHLRTHSRVLPIEHKKFGKAFAFSPDLAKHIRLRTRGKHYVCNECGKEFTCFSKLNIHIRVHTGEKPYECNKCGKAFTDSSGLIKHRRTHTGEKPYECKECGKAFANSSHLTVHMRTHTGEKPYQCKECGKAFINSSSFKSHMQTHPGVKPYDCQQCGKAFIRSSFLIRHLRSHSAERPFECEECGKAFRYSSHLSQHKRIHTGERPYKCQKCGQAFSISSGLTVHMRTHTGERPFECQECGKAFTRSTYLIRHLRSHSVEKPYKECGQTFSNSSCLTECV

SEQ ID NO: 16248 - protein, 161 aa, Homo Sapiens
MGPLQFRDVAIEFSLEEWHCLDTAQWNLYRDVMLENYRHLVFLVCGKAFNSSSNLTTHKKIHTGEKPYRCEECGKAFKRSSHLTVHKIVHTGEKSYKCEECGKAFKHPSHVTAHKKIHTGGKPYKCEECGKDFKYTSTLIAHKRIHTGEKPYKCEECGKDF

SEQ ID NO: 16249 - protein, 790 aa, Homo Sapiens
MAYCLTNCYQYSVTFEDTAVDFTQEEWILLDPVQRNLYRDVMLENYENVAKVGFQLFKPSVISWLEEEELRTLQQGVLQDWAIKHQTSVSALQQEFWKIQTSNGIQMDLVTFDSVAVEFTQEEWTLLDPAQRNLYSDVMLENYKNLSSVGYQLFKPSLISWLEEEEELSTLPRVLQEWKMCLKTKGPALWQDNFCLKTLNGIQLARNQNGEELYDCKQCEDVFCKHPCLKTNMSTQNRGNTSECIQYAKDLLSLYNKTSTIRKVSVFSKHGKSFRLILNVQVQRKCTQDKSFEGTDYGKAFIYQSYLEAHRKTQSGEKLNEWKQCGEAFTHSTSHAVNVETHIIKNPYECKECGKDFRYPTHLNNHMQTHIGIKPYKCKHCGKTFTVPSGFLEHVRTHTGEKPYGCKECGKAFGTSAGLIEHIRCHAREKTFKCDHCGKAFISYPSLFGHLRVHNGEKPYEHKEYGKAFGTSSGVIEDRRSNTGQKRFDCDQCGKVFVSFSSLFAHLRTHTGEKPFKCYKCGKPFTSSACLRIHMRTHTEERLYQCKKCGKAFTKCSYLTKHLRTHAGEKPYECMKCGKAFTERSYLTKHLRRHSGEKPYECKKCGKAFTERSDLTKHLRRHTGDKPYEYKDCGKAFVVSSSLVDHLRTHTGYKPYKCNACEKAYSRSCVLTQHLKTHAAEKTSECNACGNSFRNSMCFHDRLKTLTKIKPYKCKDCGKAFTCHSDLTNHVRIHTGEKPYKCKECGKAFRTSSGRIQHLRTHMGEKPFECDQCGKAFASFSARIAHLKTH

SEQ ID NO: 16250 - protein, 486 aa, Homo Sapiens
MAAIYLSRGFFSREPICPFEEKTKVERMVEDYLASGYQDSVTFDDVAVDFTPEEWALLDTTEKYLYRDVMLENYMNLASVEWEIQPRTKRSSLQQGFLKNQIFSGIQMTRGYSGWKLCDCKNCGEVFREQFCLKTHMRVQNGGNTSEGNCYGKDTLSVHKEASTGQELSKFNPCGKVFTLTPGLAVHLEVLNARQPYKCKECGKGFKYFASLDNHMGIHTDEKLCEFQEYGRAVTASSHLKQCVAVHTGKKSKKTKKCGKSFTNFSQLYAPVKTHKGEKSFECKECGRSFRNSSCLNDHIQIHTGIKPHKCTYCGKAFTRSTQLTEHVRTHTGIKPYECKECGQAFAQYSGLSIHIRSHSGKKPYQCKECGKAFTTSTSLIQHTRIHTGEKPYECVECGKTFITSSRRSKHLKTHSGEKPFVCKICGKAFLYSSRLNVHLRTHTGEKPFVCKECGKAFAVSSRLSRHERIHTGEKPYECKDMSVTI

SEQ ID NO: 16251 - protein, 426 aa, Homo Sapiens
MSAFDMSHGFFPREPICPFEEKTKIGTMVEDHRSNSYQDSVTFDDVAVEFTPEEWALLDTTQKYLYRDVMLENYMNLASVDFFFCLTSEWEIQPRTKRSSLQQGFLKNQIFTGIQMQTRSYSGWKLCENCGEVFSEQFCLKTHMRAQNGGNTFEGNCYGKDSISVHKEASIGQELSKFNPCGKVFTLTPGLAVHLEILNGRQPYKCKECGKGFKYFASLDNHMGIHIGEKLCEFQECERAITTSSHLKQCVAVHTGKKSEKTKNCGKSFTNFSQLSAHAKTHKGEKSFECKECGRSFRNSSSFNVHIQIHTGIKPHKCTECGKAFTRSTHLTQHVRTHTGIKPYECKECGQAFTQYTGLAIHIRNHTGEKPYQCKECGKAFNRSSTLTQHRRIHTGEKPYECVECGKTFITSSHRSKHLKTHSGER

SEQ ID NO: 16252 - protein, 476 aa, Homo Sapiens
MDAVAFEDVAVNFTQEEWALLGPSQKNLYRYVMQETIRNLDCIRMIWEEQNTEDQYKNPRRNLRCHMVERFSESKDSSQCGETFSLIRDSIVNNSICPGEDPCQSAECEEVIMGHLSLNSHIRVDSGHKPHEYQEYGEKPHTHKQRGKAFSYHHSFQSRGRPHTGKKRYECKECGKTFSSRRNLRRHMVVQGGNRPYKCKLCGKAFFWPSLLRMHERTHTGEKPYECKQCSKAFPFYSSYRRHERMHTGEKPYECKQCSKALPDSSSYIRHERTHTGEKPYTCKQCGKAFSVSSSLRRHETTHSAEKPYECKQCGKTFHHLGSFQIHMKRHTGDRPHKCKICGKGFDRPSLVRYHERIHTGEKPYECKQCGKTLSHSSSFRRHMIMHTGGGPHKCKICGKAFVYPSVCQRHEKSHSGEKPYECKQCGKALSHSSSFRRHMVMHTGDGPNKCKVCGKAFVYPSVCQRHEKTHWRETI

SEQ ID NO: 16253 - protein, 553 aa, Homo Sapiens
MDSVASEDVAVNFTLEEWALLDPSQKKLYRDVMRETFRNLACVGKKWEDQSIEDWYKNQGRILRNHMEEGLSESKEYDQCGEAFSQILNLNLNKKIPTIVRPCECSLCGKVFMHHSSLSRHIRSHLGHKPYDYQEYGEKPYKCKQCGKAFSSCQSFRRHERTHTGEKPYACPECGKAFISLPSVRRHMIKHTGDGPYKCQECGKAFDRPSLFQIHERTHTGEKPYECQECAKAFISLPSFQRHMIRHTGDGPYKCQECGKAFDRPSLFRIHERTHTGEKPHECKQCGKAFISFTNFQSHMIRHTGDGPYKCKVCGRAFIFPSYVRKHERTHTGEKPYECNKCGKTFSSSSNVRTHERTHTGEKPYECKECGKAFISLPSVRRHMIKHTGDGPYKCQVCGRAFDCPSSFQIHERTHTGEKPYECQVCGKAFISLKRIRKHMILHTGDGPYKCQVCGKAFDCPSSVRTHERTHTGEKPYECKECGKAFNYASSIRIHERTHTGEKPYECKQCGKTFSYSSSFQRHERAHNGDKPYVKNVGKLSFITQPSNTCENE

SEQ ID NO: 16254 - protein, 539 aa, Homo Sapiens
MRRGPWERWSLASHRLDAGLCTCPREESREIRAGQIVLKAMAQGLVTFRDVAIEFSLEEWKCLEPAQRDLYREVTLENFGHLASLGLSISKPDVVSLLEQGKEPWMIANDVTGPWCPDLESRCEKFLQKDIFEIGAFNWEIMESLKCSDLEGSDFRADWECEGQFERQVNEECYFKQVNVTYGHMPVFQHHTSHTVRQSRETGEKLMECHECGKAFSRGSHLIQHQKIHTGEKPFGCKECGKAFSRASHLVQHQRIHTGEKPYDCKDCGKAFGRTSELILHQRLHTGVKPYECKECGKTFRQHSQLILHQRTHTGEKPYVCKDCGKAFIRGSQLTVHRRIHTGARPYECKECGKAFRQHSQLTVHQRIHTGEKPYECKECGKGFIHSSEVTRHQRIHSGEKPYECKECGKAFRQHAQLTRHQRVHTGDRPYECKDCGKAFSRSSYLIQHQRIHTGDKPYECKECGKAFIRVSQLTHHQRIHTCEKPYECRECGMAFIRSSQLTEHQRIHPGIKPYECRECGQAFILGSQLIEHYRIHTG

SEQ ID NO: 16255 - protein, 418 aa, Homo Sapiens
MAQESVMFSDVSVDFSQEEWECLNDDQRDLYRDVMLENYSNLVSMGHSISKPNVISYLEQGKEPWLADRELTRGQWPVLESRCETKKLFLKKEIYEIESTQWEIMEKLTRRDFQCSSFRDDWECNRQFKKELGSQGGHFNQLVFTHEDLPTLSHHPSFTLQQIINSKKKFCASKEYRKTFRHGSQFATHEIIHTIEKPYECKECGKSFRHPSRLTHHQKIHTGKKPFECKECGKTFICGSDLTRHHRIHTGEKPYECKECGKAFSSGSNFTRHQRIHTGEKPYECKECGKAFSSGSNFTQHQRIHTGEKPYECKECGNAFSQSSQLIKHQRIHTGEKPYECKECEKAFRSGSDLTRHQRIHTGEKPYECKICGKAYSQSSQLISHHRIHTSEKPYEYRECGKNFNYDPQLIQHQNLYW

SEQ ID NO: 16256 - protein, 647 aa, Homo Sapiens
MAQGSVSFNDVTVDFTQEEWQHLDHAQKTLYMDVMLENYCHLISVGCHMTKPDVILKLERGEEPWTSFAGHTCLEENWKAEDFLVKFKEHQEKYSRSVVSINHKKLVKEKSKIYEKTFTLGKNPVNSKNLPPEYDTHGRILKNVSELIISNLNPARKRLSEYNGYGKSLLSTKQETTHPEVKSHNQSARAFSHNEVLMQYQKTETPAQSFGYNDCEKSFLQRGGLITHSRPYKGENPSVYNKKRRATNIEKKHTCNECGKSFCRKSVLILHQGIHSEEKPYQCHQCGNAFRRKSYLIDHQRTHTGEKPFVCNECGKSFRLKTALTDHQRTHTGEKSYECLQCRNAFRLKSHLIRHQRTHTGEKPYECNDCGKSFRQKTTLSLHQRIHTGEKPYICKECGKSFHQKANLTVHQRTHTGEKPYICNECGKSFSQKTTLALHEKTHNEEKPYICSECGKSFRQKTTLVAHQRTHTGEKSYECPHCGKAFRMKSYLIDHHRTHTGEKPYECNECGKSFSQKTNLNLHQRIHTGEKPYVCNECGKSFRQKATLTVHQKIHTGQKSYECPQCGKAFSRKSYLIHHQRTHTGEKPYKCSECGKCFRQKTNLIVHQRTHTGEKPYVCNECGKSFSYKRNLIVHQRTHKGENIEMQ

SEQ ID NO: 16257 - protein, 644 aa, Homo Sapiens
MTSQSSVISNSCVTMERLSHMMERKAWCSQESALSEEEEDTTRPLETVTFKDVAVDLTQEEWEQMKPAQRNLYRDVMLENYSNLVTVGCQVTKPDVIFKLEQEEEPWVMEEEMFGRHCPEVWEVDEQIKKQQETLVRKVTSISKKILIKEKVIECKKVAKIFPLSSDIVTSRQSFYDCDSLDKGLEHNLDLLRYEKGCVREKQSNEFGKPFYHCASYVVTPFKCNQCGQDFSHKFDLIRHERIHAGEKPYECKECGKAFSRKENLITHQKIHTGEKPYKCNECGKAFIQMSNLIRHHRIHTGEKPYACKDCWKAFSQKSNLIEHERIHTGEKPYECKECGKSFSQKQNLIEHEKIHTGEKPYACNECGRAFSRMSSVTLHMRSHTGEKPYKCNKCGKAFSQCSVFIIHMRSHTGEKPYVCSECGKAFSQSSSLTVHMRNHTAEKPYECKECGKAFSRKENLITHQKIHTGEKPYECSECGKAFIQMSNLIRHQRIHTGEKPYACTVCGKAFSQKSNLTEHEKIHTGEKPYHCNQCGKAFSQRQNLLEHEKIHTGEKPFKCNECGKAFSRISSLTLHVRSHTGEKPYECNKCGKAFSQCSLLIIHMRSHTGEKPFECNECGKAFSQRASLSIHKRGHTGERHQVY

SEQ ID NO: 16258 - protein, 686 aa, Homo Sapiens
MTESQGTVTFKDVAIDFTQEEWKRLDPAQRKLYRNVMLENYNNLITVGYPFTKPDVIFKLEQEEEPWVMEEEVLRRHWQGEIWGVDEHQKNQDRLLRQVEVKFQKTLTEEKGNECQKKFANVFPLNSDFFPSRHNLYEYDLFGKCLEHNFDCHNNVKCLMRKEHCEYNEPVKSYGNSSSHFVITPFKCNHCGKGFNQTLDLIRHLRIHTGEKPYECSNCRKAFSHKEKLIKHYKIHSREQSYKCNECGKAFIKMSNLIRHQRIHTGEKPYACKECEKSFSQKSNLIDHEKIHTGEKPYECNECGKAFSQKQSLIAHQKVHTGEKPYACNECGKAFPRIASLALHMRSHTGEKPYKCDKCGKAFSQFSMLIIHVRIHTGEKPYECNECGKAFSQSSALTVHMRSHTGEKPYECKECRKAFSHKKNFITHQKIHTREKPYECNECGKAFIQMSNLVRHQRIHTGEKPYICKECGKAFSQKSNLIAHEKIHSGEKPYECNECGKAFSQKQNFITHQKVHTGEKPYDCNECGKAFSQIASLTLHLRSHTGEKPYECDKCGKAFSQCSLLNLHMRSHTGEKPYVCNECGKAFSQRTSLIVHMRGHTGEKPYECNKCGKAFSQSSSLTIHIRGHTGEKPFDCSKCGKAFSQISSLTLHMRKHTGEKPYHCIECGKAFSQKSHLVRHQRIHTH

SEQ ID NO: 16259 - protein, 555 aa, Homo Sapiens
MDSVVFEDVAVDFTLEEWALLDSAQRDLYRDVMLETFRNLASVDDGTQFKANGSVSLQDMYGQEKSKEQTIPNFTGNNSCAYTLEKNCEGYGTEDHHKNLRNHMVDRFCTHNEGNQYGEAIHQMPDLTLHKKVSAGEKPYECTKCRTVFTHLSSLKRHVKSHCGRKAPPGEECKQACICPSHLHSHGRTDTEEKPYKCQACGQTFQHPRYLSHHVKTHTAEKTYKCEQCRMAFNGFASFTRHVRTHTKDRPYKCQECGRAFIYPSTFQRHMTTHTGEKPYKCQHCGKAFTYPQAFQRHEKTHTGEKPYECKQCGKTFSWSETLRVHMRIHTGDKLYKCEHCGKAFTSSRSFQGHLRTHTGEKPYECKQCGKAFTWSSTFREHVRIHTQEQLYKCEQCGKAFTSSRSFRGHLRTHTGEKPYECKQCGKTFTWSSTFREHVRIHTQEQLHKCEHCGKAFTSSRAFQGHLRMHTGEKPYECKQCGKTFTWSSTLHNHVRMHTGEKPHKCKQCGMSFKWHSSFRNHLRMHTGQKSHECQSYSKAFSCQVILSKTSESTH

SEQ ID NO: 16260 - protein, 536 aa, Homo Sapiens; identical to SEQ ID NO: 14444

SEQ ID NO: 16261 - protein, 609 aa, Homo Sapiens
MPHLLVTFRDVAIDFSQEEWECLDPAQRDLYRDVMLENYSNLISLDLESSCVTKKLSPEKEIYEMESLQWENMGKRINHHLQYNGLGDNMECKGNLEGQEASQEGLYMCVKITCEEKATESHSTSSTFHRIIPTKEKLYKCKECRQGFSYLSCLIQHEENHNIEKCSEVKKHRNTFSKKPSYIQHQRIQTGEKPYECMECGKAFGRTSDLIQHQKIHTNEKPYQCNACGKAFIRGSQLTEHQRVHTGEKPYECKKCGKAFSYCSQYTLHQRIHSGEKPYECKDCGKAFILGSQLTYHQRIHSGEKPYECKECGKAFILGSHLTYHQRVHTGEKPYICKECGKAFLCASQLNEHQRIHTGEKPYECKECGKTFFRGSQLTYHLRVHSGERPYKCKECGKAFISNSNLIQHQRIHTGEKPYKCKECGKAFICGKQLSEHQRIHTGEKPFECKECGKAFIRVAYLTQHEKIHGEKHYECKECGKTFVRATQLTYHQRIHTGEKPYKCKECDKAFIYGSQLSEHQRIHRGEKPYECKQCGKAFIRGSHLTEHLRTHTGEKPYECKECGRAFSRGSELTLHQRIHTGEKPYTCVQCGKDFRCPSQLTQHTRLHN

SEQ ID NO: 16262 - protein, 529 aa, Homo Sapiens
MEQEKKLLVSDSNSFMERESLKSPFTGDTSMNNLETVHHNNSKADKLKEKPSEWSKRHRPQHYKHEDAKEMPLTWVQDEIWCHDSYESDGKSENWGNFIAKEEEKPNHQEWDSGEHTNACVQQNSSFVDRPYKCSECWKSFSNSSHLRTHQRTHSGEKPYKCSECAKCFCNSSHLIQHLRMHTGEKPYQCGECGKSFSNTSHLIIHERTHTGEKPYKCPECGKRFSSSSHLIQHHRSHTGEKPYECSVCGKGFSHSYVLIEHQRTHTGEKPYKCPDCGKSFSQSSSLIRHQRTHTGEKPYKCLECEKSFGCNSTLIKHQRIHTGEKPYQCPECGKNFSRSSNLITHQKMHTGEKSYESSEYEESLGQNCNVIEECRIQLGEKPYRCCECGKSFGLSSHLIRHQRTHTGEKPYRCSECWKTFSQSSTLVIHQRTHTGEKPYKCPDCGESFSQSFNLIRHRRTHIGEKPYKCTSCEKCFSRSAYLSQHRKIHVEKPFESPDVGDFPHEWTWKNCSGEMPFISSFSVSNSSS

SEQ ID NO: 16263 - protein, 665 aa, Homo Sapiens
MFPVLEPHQVGLIRSYNSKTMTCFQELVTFRDVAIDFSRQEWEYLDPNQRDLYRDVMLENYRNLVSLGGHSISKPVVVDLLERGKEPWMILREETQFTDLDLQCEIISYIEVPTYETDISSTQLQSIYKREKLYECKKCQKKFSSGYQLILHHRFHVIERPYECKECGKNFRSGYQLTLHQRFHTGEKPYECTECGKNFRSGYQLTVHQRFHTGEKTYECRQCGKAFIYASHIVQHERIHTGGKPYECQECGRAFSQGGHLRIHQRVHTGEKPYKCKECGKTFSRRSNLVEHGQFHTDEKPYICEKCGKAFRRGHQLTVHQRVHTGKKPYECKECGKGYTTASYFLLHQRIHKGGKPYECKECKKTFTLYRNLTRHQNIHTGEKLFECKQCGKTYTTGSKLFQHQKTHTGEKPYECKECGKAFSLYGYLKQHQKIHTGMKHFECKECKKTFTLYRNLTRHQNIHTGKKLFECQECGKAYSTGSNLIQHRKTHTGEKPYKCKECGKTFSLHGYLNQHQKIHTGMKPYECKVCRKTFTFYRNLTLHQSIHTDEKPFECKECGKTFRRSSHLTAHQSIHADKKPYECKECGKAFKMYGYLTQHQKIHTGGKPYECKECGKAFSRASNLVQHERIHTGEKPYVCKQCGKTFRYGSALKAHQRIHRSIKV

SEQ ID NO: 16264 - protein, 896 aa, Homo Sapiens
MTEESEETVLYIEHRYVCSECNQLYGSLEEVLMHQNSHVPQQHFELVGVADPGVTVATDTASGTGLYQTLVQESQYQCLECGQLLMSPSQLLEHQELHLKMMAPQEAVPAEPSPKAPPLSSSTIHYECVDCKALFASQELWLNHRQTHLRATPTKAPAPVVLGSPVVLGPPVGQARVAVEHSYRKAEEGGEGATVPSAAATTTEVVTEVELLLYKCSECSQLFQLPADFLEHQATHFPAPVPESQEPALQQEVQASSPAEVPVSQPDPLPASDHSYELRNGEAIGRDRRGRRARRNNSGEAGGAATQELFCSACDQLFLSPHQLQQHLRSHREGVFKCPLCSRVFPSPSSLDQHLGDHSSESHFLCVDCGLAFGTEALLLAHRRAHTPNPLHSCPCGKTFVNLTKFLYHRRTHGVGGVPLPTTPVPPEEPVIGFPEPAPAETGEPEAPEPPVSEETSAGPAAPGTYRCLLCSREFGKALQLTRHQRFVHRLERRHKCSICGKMFKKKSHVRNHLRTHTGERPFPCPDCSKPFNSPANLARHRLTHTGERPYRCGDCGKAFTQSSTLRQHRLVHAQHFPYRCQECGVRFHRPYRLLMHRYHHTGEYPYKCRECPRSFLLRRLLEVHQLVVHAGRQPHRCPSCGAAFPSSLRLREHRCAAAAAQAPRRFECGTCGKKVGSAARLQAHEAAHAAAGPGEVLAKEPPAPRAPRATRAPVASPAALGSTATASPAAPARRRGLECSECKKLFSTETSLQVHRRIHTGERPYPCPDCGKAFRQSTHLKDHRRLHTGERPFACEVCGKAFAISMRLAEHRRIHTGERPYSCPDCGKSYRSFSNLWKHRKTHQQQHQAAVRQQLAEAEAAVGLAVMETAVEALPLVEAIEIYPLAEAEGVQISG

SEQ ID NO: 16265 - protein, 245 aa, Homo Sapiens
MLERGAESAAGATDPSPTGKEPVTKEAPHQGPPQKPSQSAPGPTASAGSPPRPRRRPPPQRPHRCPDCDKAFSYPSKLATHRLAHGGARPHPCPDCPKAFSYPSKLAAHRLTHSGARPHPCPHCPKSFGHRSKLAAHLWTHAPTRPYPCPDCPKSFCYPSKLAAHRHTHHATDARPYPCPHCPKAFSFPSKLAAHRLCHDPPTAPGSQATAWHRCSSCGQAFGQRRLLLLHQRSHHQVEHKGERD

SEQ ID NO: 16266 - protein, 715 aa, Homo Sapiens
MSSPKRSSKPSMSLAPSGSSMPTADPKPPASLKSTKSATPNRSLVPTKPATSRNSVMSPSSSKSTKSTSTKRAPSNRPSSRSRVRSKARTPSRVSTDTRTSKASKASDVRCHQRRGTHSRGRTPGRRGSRSSKRSPSRASTPGRIRTHGARPGMASRVRTPTSQQKGSRGKSYGRPRTSNRERSDSQPRNLSKKSYRPPGGSGIGRSSELAVTPSTAKCQTPTGIPSKEKSDNPSPSSSRKVKSYGQMIIPSREKSYSPTEMSSRVKSYNQASTRSRPQSHSQSRSPRRSRSGSQKRTHSRVRSHSWKRNHSRARSRTRKGILSQMGRHSQSRSHSKGKSQNQSRTPRRGRSHNWSRNPSKERSHSHSRSSSKERDHRGSSSPRKESGRSQSGSPNKQRDHSRSRSPNKARDRSRSRSPYKARDRSRSRSPNKARDCSRSRSPYKARDRSRSRSPNKARDHSRSRSPNKARDRSRSRSPSKERDHSQLGSPSKERDHRRSRSPSKERQCRQSRSSSKERDHRRSRSPSKERQRRQSRSPNKERDRSQSRSPSEEREHRQSRSPSKERDRRRWRSPSKERERRQSRSSSEERDHSRSRSPNKQSGYSRPRASSKEKAHSRSRTPSKEGNHSQSRTSSKESDPSQSTVPRSPDWKRSPTRTSSLSQNRTPSKTSSHSPSTFPSGGQTLSQDDSQADATTSKATLPGERSSSSSSKLA

SEQ ID NO: 16267 - protein, 170 aa, Homo Sapiens
MEDPNPEENMKQQDSPKERSPQSPGGNICHLGAPKCTRCLITFADSKFQERHMKREHPADFVAQKLQGVLFICFTCARSFPSSKALITHQRSHGPAAKPTLPVATTTAQPTFPCPDCGKTFGQAVSLRRHRQMHEVRAPPGTFACTECGQDFAQEAGLHQHYIRHARGEL

SEQ ID NO: 16268 - protein, 485 aa, Homo Sapiens
MKNATIVMSVRREQGSSSGEGSLSFEDVAVGFTREEWQFLDQSQKVLYKEVMLENYINLVSIGYRGTKPDSLFKLEQGEPPGIAEGAAHSQICPGFVIQSRRYAGKDSDAFGGYGRSCLHIKRDKTLTGVKYHRCVKPSSPKSQLNDLQKICAGGKPHECSVCGRAFSRKAQLIQHQRTERGEKPHGCGECGKTFMRKIQLTEHQRTHTGEKPHECSECGKAFSRKSQLMVHQRTHTGEKPYRCSKCGKAFSRKCRLNRHQRSHTGEKLYGCSVCGKAFSQKAYLTAHQRLHTGDKPYKCSDCGRTFYFKSDLTRHQRIHTGEKPYECSECEKAFRSKSKLIQHQRTHTGERPYSCRECGKAFAHMSVLIKHEKTHIRETAINSLTVEKPSSRSHTSLYMSELIQEQKTVNTVPIEMPSSGTPPLLNKSERLVGRNVVIVEQPFPRNQAFVVNQEFEQRISLTNEVNVAPSVINYILYLTDIVSE

SEQ ID NO: 16269 - protein, 590 aa, Homo Sapiens
MLHEEAAQKRKGKEPGMALPQGRLTFRDVAIEFSLAEWKFLNPAQRALYREVMLENYRNLEAVDISSKRMMKEVLSTGQGNTEVIHTGMLQRHESYHTGDFCFQEIEKDIHDFEFQSQKDERNGHEASMPKIKELMGSTDRHDQRHAGNKPIKDQLGLSFHLHLPELHIFQPEEKIANQVEKSVNDASSISTSQRISCRPETHTPNNYGNNFFHSSLLTQKQEVHMREKSFQCNETGEAFNCSSFVRKHQIIHLGEKQYKFDICGKVFNEKRYLARHRRCHTSEKPYKCNECGKSFSYKSSLTCHRRCHTGEKPYKCNECGKSFSYKSSLTCHHRCHTGEKPYKCNECGKSFSYKSSLRCHRRLHTGIKPYKCNECGKMFGQNSTLVIHKAIHTGEKPYKCNECGKAFNQQSHLSRHHRLHTGEKPYKCNDCGKAFIHQSSLARHHRLHTGEKSYKCEECDRVFSQKSNLERHKIIHTGEKPYKCNECHKTFSHRSSLPCHRRLHSGEKPYKCNECGKTFNVQSHLSRHHRLHTGEKPYKCKVCDKAFMCHSYLANHTRIHSGEKPYKCNECGKAHNHLIDSSIKPCMSS

SEQ ID NO: 16270 - protein, 562 aa, Homo Sapiens
MDPQPPPPAQGSPPHRGRGRGRGRGRGRGRGRGRGGAGAPRAPLPCPTCGRLFRFPYYLSRHRLSHSGLRPHACPLCPKAFRRPAHLSRHLRGHGPQPPLRCAACPRTFPEPAQLRRHLAQEHAGGEVELAIERVAKETAEPSWGPQDEGSEPPTTAAAGATEEEAVAAWPETWPAGEPSTLAAPTSAAEPRESESEEAEAGAAELRAELALAAGRQEEKQVLLQADWTLLCLRCREAFATKGELKAHPCLRPEGEQEGEGGPPPRPKRHQCSICLKAFARPWSLSRHRLVHSTDRPFVCPDCGLAFRLASYLRQHRRVHGPLSLLAPLPAAGKKDDKASGARNSAKGPEGGEGAECGGASEGGEGQNGGDAAPARPPAGEPRFWCPECGKGFRRRAHLRQHGVTHSGARPFQCVRCQREFKRLADLARHAQVHAGGPAPHPCPRCPRRFSRAYSLLRHQRCHRAELERAAALQALQAQAPTSPPPPPPPLKAEQEEEGLPLPLANIKEEPPSPGTPPQSPPAPPVFLSASCFDSQDHSAFEMEEEEVDSKAHLRGLGGLAS

SEQ ID NO: 16271 - protein, 172 aa, Homo Sapiens
MLLLPPRPPHPRSSSPEAMDPPPPKAPPFPKAEGPSSTPSSAAGPRPPRLGRHLLIDANGVPYTYTVQLEEEPRGPPQREAPPGEPGPRKGYSCPECARVFASPLRLQSHRVSHSDLKPFTCGACGKAFKRSSHLSRHRATHRARAGPPHTCPLCPRRFQDAAELAQHVRLH

SEQ ID NO: 16272 - protein, 197 aa, Homo Sapiens
MLVLPSPCPQPLAFSSVETMEGPPRRTCRSPEPGPSSSIGSPQASSPPRPNHYLLIDTQGVPYTVLVDEESQREPGASGAPGQKKCYSCPVCSRVFEYMSYLQRHSITHSEVKPFECDICGKAFKRASHLARHHSIHLAGGGRPHGCPLCPRRFRDAGELAQHSRVHSGERPFQCPHCPRRFMEQNTLQKHTRWKHP

SEQ ID NO: 16273 - protein, 517 aa, Homo Sapiens
MSLGSELFRDVAIVFSQEEWQWLAPAQRDLYRDVMLETYSNLVSLGLAVSKPDVISFLEQGKEPWMVERVVSGGLCPVLESRYDTKELFPKQHVYEVESPQWEIMESLTSYGLECSSFQDDWECRNQFDRQQGNPDRHFHQMIIRHEEMPTFDQHASLTFYQKIHTREKPFGYNKCRKDFWQKELLINHQGIYTNEKPYKCKECGKAFKYGSRLIQHENIHSGKKPYECKECGKAFNSGSNFIQHQRVHTGEKPYECKDCEKAFSRSSQLIEHQRTHTGEKPYQCKECGKAFNRISHLKVHYRIHTGEKPYACKECGKTFSHRSQLIQHQTVHTGRKLYECKECGKAFNQGSTLIRHQRIHTGEKPYECKVCGKAFRVSSQLKQHQRIHTGEKPYQCKVCGRAFKRVSHLTVHYRIHTGEKPYECKECGKAFSHCSQLIHHQVIHTEKKPYEYKECEKTLSHDSTTVQPQRMHNRETHVNIINVEKPSISSYPLLIIREFMLASNHMNGSNGESPLA

SEQ ID NO: 16274 - protein, 569 aa, Homo Sapiens
MSKDLVTFGDVAVNFSQEEWEWLNPAQRNLYRKVMLENYRSLVSLGVSVSKPDVISLLEQGKEPWMVKKEGTRGPCPDWEYVFKNSEFSSKQETYEESSKVVTVGARHLSYSLDYPSLREDCQSEDWYKNQLGSQEVHLSQLIITHKEILPEVQNKEYNKSWQTFHQDTIFDIQQSFPTKEKAHKHEPQKKSYRKKSVEMKHRKVYVEKKLLKCNDCEKVFNQSSSLTLHQRIHTGEKPYACVECGKTFSQSANLAQHKRIHTGEKPYECKECRKAFSQNAHLAQHQRVHTGEKPYQCKECKKAFSQIAHLTQHQRVHTGERPFECIECGKAFSNGSFLAQHQRIHTGEKPYVCNVCGKAFSHRGYLIVHQRIHTGERPYECKECRKAFSQYAHLAQHQRVHTGEKPYECKVCRKAFSQIAYLDQHQRVHTGEKPYECIECGKAFSNSSSLAQHQRSHTGEKPYMCKECRKTFSQNAGLAQHQRIHTGEKPYECNVCGKAFSYSGSLTLHQRIHTGERPYECKDCRKSFRQRAHLAHHERIHTMESFLTLSSPSPSTSNQLPRPVGFIS

SEQ ID NO: 16275 - protein, 421 aa, Homo Sapiens
MAGEAEAQLDPSLQGLVMFEDVTVYFSREEWGLLNVTQKGLYRDVMLENFALVSSLGLAPSRSPVFTQLEDDEQSWVPSWVDVTPVSRAEARRGFGLDGLCRVEDERAHPEHLKSYRVIQHQDTHSEGKPRRHTEHGAAFPPGSSCGQQQEVHVAEKLFKCSDCGKVFLKAFALLDHLITHSEERPFRCPTGRSAFKKSAHINPRKIHTGETAHVCNECGKAFSYPSKLRKHQKVHTGIKPFKCSDCGKTFNRKDALVLHQRIHTGERPYECSKCGKTFSVLSTLIRHRKVHIGERPYECTECGKFFKYNNSFILHQRVHTGERPFECKQCGKGYVTRSGLYQHWKVHTGERPYECSLCGKTFTTRSYRNRHQQFHTEERSYECTECGKAFKHSSTLLQHKKVHTPERRQEDRAHGKVVSC

SEQ ID NO: 16276 - protein, 769 aa, Homo Sapiens
MPANWTSPQKSSALAPEDHGSSYEGSVSFRDVAIDFSREEWRHLDPSQRNLYRDVMLETYSHLLSVGYQVPEAEVVMLEQGKEPWALQGERPRQSCPGEKLWDHNQCRKILSYKQVSSQPQKMYPGEKAYECAKFEKIFTQKSQLKVHLKVLAGEKLYVCIECGKAFVQKPEFIIHQKTHMREKPFKCNECGKSFFQVSSLFRHQRIHTGEKLYECSQCGKGFSYNSDLSIHEKIHTGERHHECTDCGKAFTQKSTLKMHQKIHTGERSYICIECGQAFIQKTHLIAHRRIHTGEKPYECSNCGKSFISKSQLQVHQRVHTRVKPYICTEYGKVFSNNSNLVTHKKVQSREKSSICTECGKAFTYRSELIIHQRIHTGEKPYECSDCGKAFTQKSALTVHQRIHTGEKSYICMKCGLAFIQKAHLIAHQIIHTGEKPHKCGHCGKLFTSKSQLHVHKRIHTGEKPYMCNKCGKAFTNRSNLITHQKTHTGEKSYICSKCGKAFTQRSDLITHQRIHTGEKPYECNTCGKAFTQKSHLNIHQKIHTGERQYECHECGKAFNQKSILIVHQKIHTGEKPYVCTECGRAFIRKSNFITHQRIHTGEKPYECSDCGKSFTSKSQLLVHQPVHTGEKPYVCAECGKAFSGRSNLSKHQKTHTGEKPYICSECGKTFRQKSELITHHRIHTGEKPYECSDCGKSFTKKSQLQVHQRIHTGEKPYVCAECGKAFTDRSNLNKHQTTHTGDKPYKCGICGKGFVQKSVFSVHQSSHA

SEQ ID NO: 16277 - protein, 769 aa, Homo Sapiens
MPASWTSPQKSSALAPEDHGSSYEGSVSFRDVAIDFSREEWRHLDLSQRNLYRDVMLETYSHLLSVGYQVPKPEVVMLEQGKEPWALQGERPRHSCPGEKLWDHNQHRKIIGYKPASSQDQKIYSGEKSYECAEFGKSFTWKSQFKVHLKVPTGEKLYVCIECGRAFVQKPEFITHQKTHMREKPYKCNECGKSFFQVSSLFRHHRIHTGEKLYECSECGKGFPYNSDLSIHEKIHTGERHHECTDCGKAFTQKSTLKIHQKIHTGERSYICIECGQAFIQKTQLIAHRRIHSGEKPYECNNCGKSFISKSQLQVHQRVHTRVKPYICTEYGKVFSNNSNLITHEKIQSREKSSICTECGKAFTYRSELIIHQRIHTGEKPYECSDCGRAFTQKSALTVHQRIHTGEKSYICMKCGLAFIRKAHLITHQIIHTGEKPYKCGHCGKLFTSKSQLHVHKRIHTGEKPYVCNKCGKAFTNRSNLITHQKTHTGEKSYICSKCGKAFTQRSDLITHQRIHTGEKPYECNTCGKAFTQKSNLNIHQKIHTGERQYECHECGKAFNQKSILIVHQKIHTGEKPYVCTECGRAFIRKSNFITHQRIHTGEKPYECSDCGKSFTSKSQLLVHQPVHTGEKPYVCAECGKAFSGRSNLSKHQKTHTGEKPYICSECGKTFRQKSELITHHRIHTGEKPYECSDCGKSFTKKSQLQVHQRIHTGEKPYVCAECGKAFSNRSNLNKHQTTHTGDKPYKCGICGKGFVQKSVFSVHQSSHA

SEQ ID NO: 16278 - protein, 402 aa, Homo Sapiens
MAAAAALRAPAQSSVTFEDVAVNFSLEEWSLLNEAQRCLYRDVMLETLTLISSLGCWHGGEDEAAPSKQSTCIHIYKDQGGHSGERPYECGEYRKLFKNKSCLTEPRRDHKHRNVRTGERPYECSKYGKLFHQKPTLHIHERFHTGQKTYECSECGKSFHQSSSLLQRQTLHTRERPYECIECGKAFAEKSSLINHRKVHSGAKRYECNECGKSFAYTSSLIKHRRIHTGERPYECSECGRSFAENSSLIKHLRVHTGERPYECVECGKSFRRSSSLLQHQRVHTRERPYECSECGKSFSLRSNLIHHQRVHTGERHECGQCGKSFSRKSSLIIHLRVHTGERPYECSDCGKSFAENSSLIKHLRVHTGERPYECIDCGKSFRHSSSFRRHQRVHTGMRPYK

SEQ ID NO: 16279 - protein, 575 aa, Homo Sapiens
MAAAVPRRPTQQGTVTFEDVAVNFSQEEWCLLSEAQRCLYRDVMLENLALISSLGCWCGSKDEEAPCKQRISVQRESQSRTPRAGVSPKKAHPCEMCGLILEDVFHFADHQETHHKQKLNRSGACGKNLDDTAYLHQHQKQHIGEKFYRKSVREASFVKKRKLRVSQEPFVFREFGKDVLPSSGLCQEEAAVEKTDSETMHGPPFQEGKTNYSCGKRTKAFSTKHSVIPHQKLFTRDGCYVCSDCGKSFSRYVSFSNHQRDHTAKGPYDCGECGKSYSRKSSLIQHQRVHTGQTAYPCEECGKSFSQKGSLISHQLVHTGEGPYECRECGKSFGQKGNLIQHQQGHTGERAYHCGECGKSFRQKFCFINHQRVHTGERPYKCGECGKSFGQKGNLVHHQRGHTGERPYECKECGKSFRYRSHLTEHQRLHTGERPYNCRECGKLFNRKYHLLVHERVHTGERPYACEVCGKLFGNKHSVTIHQRIHTGERPYECSECGKSFLSSSALHVHKRVHSGQKPYKCSECGKSFSECSSLIKHRRIHTGERPYECTKCGKTFQRSSTLLHHQSSHRRKAL

SEQ ID NO: 16280 - protein, 364 aa, Homo Sapiens
MWAPREQLLGWTAEALPAKDSAWPWEEKPRYLGPVTFEDVAVLFTEAEWKRLSLEQRNLYKEVMLENLRNLVSLAESKPEVHTCPSCPLAFGSQQFLSQDELHNHPIPGFHAGNQLHPGNPCPEDQPQSQHPSDKNHRGAEAEDQRVEGGVRPLFWSTNERGALVGFSSLFQRPPISSWGGNRILEIQLSPAQNASSEEVDRISKRAETPGFGAVTFGECALAFNQKSNLFRQKAVTAEKSSDKRQSQVCRECGRGFSRKSQLIIHQRTHTGEKPYVCGECGRGFIVESVLRNHLSTHSGEKPYVCSHCGRGFSCKPYLIRHQRTHTREKSFMCTVCGRGFREKSELIKHQRIHTGDKPYVCRD

SEQ ID NO: 16281 - protein, 1267 aa, Homo Sapiens
MGDMKTPDFDDLLAAFDIPDPTSLDAKEAIQTPSEENESPLKPPGICMDESVSLSHSGSAPDVPAVSVIVKNTSRQESFEAEKDHITPSLLHNGFRGSDLPPDPHNCGKFDSTFMNGDSARSFPGKLEPPKSEPLPTFNQFSPISSPEPEDPIKDNGFGIKPKHSDSYFPPPLGCGAVGGPVLEALAKFPVPELHMFDHFCKKEPKPEPLPLGSQQEHEQSGQNTVEPHKDPDATRFFGEALEFNSHPSNSIGESKGLARELGTCSSVPPRQRLKPAHSKLSSCVAALVALQAKRVASVTKEDQPGHTKDLSGPTKESSKGSPKMPKSPKSPRSPLEATRKSIKPSDSPRSICSDSSSKGSPSVAASSPPAIPKVRIKTIKTSSGEIKRTVTRILPDPDDPSKSPVGSPLGSAIAEAPSEMPGDEVPVEEHFPEAGTNSGSPQGARKGDESMTKASDSSSPSCSSGPRVPKGAAPGSQTGKKQQSTALQASTLAPANLLPKAVHLANLNLVPHSVAASVTAKSSVQRRSQPQLTQMSVPLVHQVKKAAPLIVEVFNKVLHSSNPVPLYAPNLSPPADSRIHVPASGYCCLECGDAFALEKSLSQHYGRRSVHIEVLCTLCSKTLLFFNKCSLLRHARDHKSKGLVMQCSQLLVKPISADQMFVSAPVNSTAPAAPAPSSSPKHGLTSGSASPPPPALPLYPDPVRLIRYSIKCLECHKQMRDYMVLAAHFQRTTEETEGLTCQVCQMLLPNQCSFCAHQRIHAHKSPYCCPECGVLCRSAYFQTHVKENCLHYARKVGYRCIHCGVVHLTLALLKSHIQERHCQVFHKCAFCPMAFKTASSTADHSATQHPTQPHRPSQLIYKCSCEMVFNKKRHIQQHFYQNVSKTQVGVFKCPECPLLFVQKPELMQHVKSTHGVPRNVDELSSLQSSADTSSSRPGSRVPTEPPATSVAARSSSLPSGRWGRPEAHRRVEARPRLRNTGWTCQECQEWVPDRESYVSHMKKSHGRTLKRYPCRQCEQSFHTPNSLRKHIRNNHDTVKKFYTCGYCTEDSPSFPRPSLLESHISLMHGIRNPDLSQTSKVKPPGGHSPQVNHLKRPVSGVGDAPGTSNGATVSSTKRHKSLFQCAKCSFATDSGLEFQSHIPQHQVDSSTAQCLLCGLCYTSASSLSRHLFIVHKVRDQEEEEEEEAAAAEMAVEVAEPEEGSGEEVPMETRENGLEECAGEPLSADPEARRLLGPAPEDDGGHNDHSQPQASQDQDSHTLSPQV

SEQ ID NO: 16282 - protein, 134 aa, Homo Sapiens
MGRSRRTGAHRAHSLARQMKAKRRRPDLDEIHRELRPQGSARPQPDPNAEFDPDLPGGGLHRCLACARYFIDSTNLKTHFRSKDHKKRLKQLSVEPYSQEEAERAAGMGSYVPPRRLAVPTEVSTEVPEMDTST

SEQ ID NO: 16283 - protein, 807 aa, Homo Sapiens
MKEWKSKMEISEEKKSARAASEKLQRQITQECELVETSNSEDRLLKHWVSPLKDAMRHLPSQESGIREMHIIPQKAIVGEIGHGCNEGEKILSAGESSHRYEVSGQNFKQKSGLTEHQKIHNINKTYECKECEKTFNRSSNLIIHQRIHTGNKPYVCNECGKDSNQSSNLIIHQRIHTGKKPYICHECGKDFNQSSNLVRHKQIHSGGNPYECKECGKAFKGSSNLVLHQRIHSRGKPYLCNKCGKAFSQSTDLIIHHRIHTGEKPYECYDCGQMFSQSSHLVPHQRIHTGEKPLKCNECEKAFRQHSHLTEHQRLHSGEKPYECHRCGKTFSGRTAFLKHQRLHAGEKIEECEKTFSKDEELREEQRIHQEEKAYWCNQCGRNFQGTSDLIRHQVTHTGEKPYECKECGKTFNQSSDLLRHHRIHSGEKPCVCSKCGKSFRGSSDLIRHHRVHTGEKPYECSECGKAFSQRSHLVTHQKIHTGEKPYQCTECGKAFRRRSLLIQHRRIHSGEKPYECKECGKLFIWRTAFLKHQSLHTGEKLECEKTFSQDEELRGEQKIHQEAKAYWCNQCGRAFQGSSDLIRHQVTHTREKPYECKECGKTFNQSSDLLRHHRIHSGEKPYVCNKCGKSFRGSSDLIKHHRIHTGEKPYECSECGKAFSQRSHLATHQKIHTGEKPYQCSECGNAFRRRSLLIQHRRLHSGEKPYECKECGKLFMWHTAFLKHQRLHAGEKLEECEKTFSKDEELRKEQRTHQEKKVYWCNQCSRTFQGSSDLIRHQVTHTREKPYECKECGKTQSELRPSETS

SEQ ID NO: 16284 - protein, 648 aa, Homo Sapiens
MELVTFRDVAIEFSPEEWKCLDPAQQNLYRDVMLENYRNLVSLGFVISNPDLVTCLEQIKEPCNLKIHETAAKPPAICSPFSQDLSPVQGIEDSFHKLILKRYEKCGHENLQLRKGCKRVNECKVQKGVNNGVYQCLSTTQSKIFQCNTCVKVFSKFSNSNKHKIRHTGEKPFKCTECGRSFYMSHLTQHTGIHAGEKPYKCEKCGKAFNRSTSLSKHKRIHTGEKPYTCEECGKAFRRSTVLNEHKKIHTGEKPYKCEECGKAFTRSTTLNEHKKIHTGEKPYKCKECGKAFRWSTSLNEHKNIHTGEKPYKCKECGKAFRQSRSLNEHKNIHTGEKPYTCEKCGKAFNQSSSLIIHRSIHSEQKLYKCEECGKAFTWSSSLNKHKRIHTGEKPYTCEECGKAFYRSSHLAKHKRIHTGEKPYTCEECGKAFNQSSTLILHKRIHSGQKPYKCEECGKAFTRSTTLNEHKKIHTGEKPYKCEECGKAFIWSASLNEHKNIHTGEKPYKCKECGKAFNQSSGLIIHRSIHSEQKLYKCEECGKAFTRSTALNEHKKIHSGEKPYKCKECGKAYNLSSTLTKHKRIHTGEKPFTCEECGKAFNWSSSLTKHKIIHTGEKSYKCEECGKAFNRPSTLTVHKRIHTGKEHS

SEQ ID NO: 16285 - protein, 504 aa, Homo Sapiens
MPSPDSMTFEDIIVDFTQEEWALLDTSQRKLFQDVMLENISHLVSIGKQLCKSVVLSQLEQVEKLSTQRISLLQGREVGIKHQEIPFIQHIYQKGTSTISTMRSHTQEDPFLCNDLGEDFTQHIALTQNVITYMRTKHFVSKKFGKIFSDWLSFNQHKEIHTKCKSYGSHLFDYAFIQNSALRPHSVTHTREITLECRVCGKTFSKNSNLRRHEMIHTGEKPHGCHLCGKAFTHCSDLRKHERTHTGEKPYGCHLCGKAFSKSSNLRRHEMIHTREKAQICHLCGKAFTHCSDLRKHERTHLGDKPYGCLLCGKAFSKCSYLRQHERTHNGEKPYECHLCGKAFSHCSHLRQHERSHNGEKPHGCHLCGKAFTESSVLKRHERIHTGEKPYECHVCGKAFTESSDLRRHERTHTGEKPYECHLCGKAFNHSSVLRRHERTHTGEKPYECNICGKAFNRSYNFRLHRRVHTGEKPYVCPLCGKAFSKFFNLRQHERTHTKKAMNM

SEQ ID NO: 16286 - protein, 424 aa, Homo Sapiens
MASMPPTPEAQGPILFEDLAVYFSQEECVTLHPAQRSLSKDGTKESLEDAALMGEEGKPEINQQLSLESMELDELALEKYPIAAPLVPYPEKSSEDGVGNPEAKILSGTPTYKRRVISLLVTIENHTPLVELSEYLGTNTLSEILDSPWEGAKNVYKCPECDQNFSDHSYLVLHQKIHSGEKKHKCGDCGKIFNHRANLRTHRRIHTGEKPYKCAKCSASFRQHSHLSRHMNSHVKEKPYTCSICGRGFMWLPGLAQHQKSHSAENTYESTNCDKHFNEKPNLALPEETFVSGPQYQHTKCMKSFRQSLYPALSEKSHDEDSERCSDDGDNFFSFSKFKPLQCPDCDMTFPCFSELISHQNIHTEERPHKCKTCEESFALDSELACHQKSHMLAEPFKCTVCGKTFKSNLHLITHKRTHIKNTT

SEQ ID NO: 16287 - protein, 904 aa, Homo Sapiens
MAAAGGAEGRRAALEAAAAAAPERGGGSCVLCCGDLEATALGRCDHPVCYRCSTKMRVLCEQRYCAVCREELRQVVFGKKLPAFATIPIHQLQHEKKYDIYFADGKVYALYRQLLQHECPRCPELPPFSLFGDLEQHMRRQHELFCCRLCLQHLQIFTYERKWYSRKDLARHRMQGDPDDTSHRGHPLCKFCDERYLDNDELLKHLRRDHYFCHFCDSDGAQDYYSDYAYLREHFREKHFLCEEGRCSTEQFTHAFRTEIDLKAHRTACHSRSRAEARQNRHIDLQFSYAPRHSRRNEGVVGGEDYEEVDRYSRQGRVARAGTRGAQQSRRGSWRYKREEEDREVAAAVRASVAAQQQEEARRSEDQEEGGRPKKEEAAARGPEDPRGPRRSPRTQGEGPGPKETSTNGPVSQEAFSVTGPAAPGCVGVPGALPPPSPKLKDEDFPSLSASTSSSCSTAATPGPVGLALPYAIPARGRSAFQEEDFPALVSSVPKPGTAPTSLVSAWNSSSSSKKVAQPPLSAQATGSGQPTRKAGKGSRGGRKGGPPFTQEEEEDGGPALQELLSTRPTGSVSSTLGLASIQPSKVGKKKKVGSEKPGTTLPQPPPATCPPGALQAPEAPASRAEGPVAVVVNGHTEGPAPARSAPKEPPGLPRPLGSFPCPTPQEDFPALGGPCPPRMPPPPGFSAVVLLKGTPPPPPPGLVPPISKPPPGFSGLLPSPHPACVPSPATTTTTKAPRLLPAPRAYLVPENFRERNLQLIQSIRDFLQSDEARFSEFKSHSGEFRQGLISAAQYYKSCRDLLGENFQKVFNELLVLLPDTAKQQELLSAHTDFCNREKPLSTKSKKNKKSAWQATTQQAGLDCRVCPTCQQVLAHGDASSHQALHAARDDDFPSLQAIARIIT

SEQ ID NO: 16288 - protein, 588 aa, Homo Sapiens
MAAPALALVSFEDVVVTFTGEEWGHLDLAQRTLYQEVMLETCRLLVSLGHPVPKPELIYLLEHGQELWTVKRGLSQSTCAGEKAKPKITEPTASQLAFSEESSFQELLAQRSSRDSRLGQARDEEKLIKIQEGNLRPGTNPHKEICPEKLSYKHDDLEPDDSLGLRVLQERVTPQDALHECDSQGPGKDPMTDARNNPYTCTECGKGFSKKWALVRHQQIHAGVKPYECNECGKACRYMADVIRHMRLHTGEKPYKCIECGKAFKRRFHLTEHQRIHTGDKPYECKECGKAFTHRSSFIQHNMTHTREKPFLCKECGKAFYYSSSFAQHMRIHTGKKLYECGECGKAFTHRSTFIQHNVTHTGEKPFLCKECGKTFCLNSSFTQHMRIHTGEKPYECGECGKAFTHRSTFIRHKRTHTGEKPFECKECGKAFCDSSSLIQHMRIHTGEKPYECSECGKAFTHHSVFIRHNRTHSGQKPLECKECAKAFYYSSSFTRHMRIHTGEKPYVCRECGKAFTQPANFVRHNRIHTGEKPFECKECEKAFCDNFALTQHMRTHTGEKPFECNECGKTFSHSSSFTHHRKIHTRV

SEQ ID NO: 16289 - protein, 722 aa, Homo Sapiens
MMKEVLSTGQGNTEVIHTGTLQRYQSYHIGDFCFQEIEKEIHDIEFQCQEDERNGHEAPMTKIKKLTGSTDQHDHRHAGNKPIKDQLGSSFYSHLPELHIIQIKGKIGNQFEKSTSDAPSVSTSQRISPRPQIHISNNYGNNSPNSSLLPQKQEVYMREKSFQCNESGKAFNCSSLLRKHQIPHLGDKQYKCDVCGKLFNHKQYLTCHCRCHTGEKPYKCNECGKSFSQVSSLTCHRRLHTAVKSHKCNECGKIFGQNSALVIHKAIHTGEKPYKCNECDKAFNQQSNLARHRRIHTGEKPYKCEECDKVFSRKSTLESHKRIHTGEKPYKCKVCDTAFTWNSQLARHKRIHTGEKTYKCNECGKTFSHKSSLVCHHRLHGGEKSYKCKVCDKAFAWNSHLVRHTRIHSGGKPYKCNECGKTFGQNSDLLIHKSIHTGEQPYKYEECEKVFSCGSTLETHKIIHTGEKPYKCKVCDKAFACHSYLAKHTRIHSGEKPYKCNECSKTFRLRSYLASHRRVHSGEKPYKCNECSKTFSQRSYLHCHRRLHSGEKPYKCNECGKTFSHKPSLVHHRRLHTGEKSYKCTVCDKAFVRNSYLARHTRIHTAEKPYKCNECGKAFNQQSQLSLHHRIHAGEKLYKCETCDKVFSRKSHLKRHRRIHPGKKPYKCKVCDKTFGSDSHLKQHTGLHTGEKPYKCNECGKAFSKQSTLIHHQAVHGVGKLD

SEQ ID NO: 16290 - protein, 641 aa, Homo Sapiens
MIQSQISFEDVAVDFTLEEWQLLNPTQKNLYRDVMLENYSNLVFLEVWLDNPKMWLRDNQDNLKSMERGHKYDVFGKIFNSSINIVHVGLRSHKCGTGEKSLKCPFDLLIPKNNCERKKIDELNKKLLFCIKPGRTHGGIKYCDCSTCRKSSNEEPWLTANHITHTGVYLCMECGRFFNKKSQLVIHQRTHTGEKPYQCSECGKAFSQKSLLTVHQRTHSGEKPHGCSECQKAFSRKSLLILHQRIHTGEKPYGCSECGKAFSRKSQLKRHQITHTIEKPYSCSECGKAFSQKLKLITHQRAHTGEKPYPCSHCGKAFFWKSQLITHQRTHTGKKPYGCGECQKAFSRNSLLIRHQRIHTGEKPYECNECGEAFIRKPQLIKHQITHTGEKNYRCSDCEEAFFKKSELIRHQKIHLGEKPYGCIQCGKTFFGKSQLLTHHRTHTGEKPYECSECGKAFTQKSSLISHQRTHTGEKPYECSECRKTFSEKSSLIHHQRTHTGEKPFECSECRKAFAWKPQLLRHQRIHTGEKPYECSECGKAFVQKVQLIKHQRNHTGEKTYGCSDCAKAFFEKAQLIIHQRIHTGERPYKCGECGKSFTRKSHLMRHQRIHTGDKYYGCNECGTTFNRKSQLMIHQRNHII

SEQ ID NO: 16291 - protein, 792 aa, Homo Sapiens
MAAINPWASWGALTDQSWGMTAVDPWASWALCPQYPAWHVEGSLEEGRRATGLPAAQVQEPVTFKDVAVDFTQEEWGQLDLVQRTLYRDVMLETYGHLLSVGNQIAKPEVISLLEQGEEPWSVEQACPQRTCPEWVRNLESKALIPAQSIFEEEQSHGMKLERYIWDDPWFSRLEVLGCKDQLEMYHMNQSTAMRQMVFMQKQVLSQRSSEFCGLGAEFSQNLNFVPSQRVSQIEHFYKPDTHAQSWRCDSAIMYADKVTCENNDYDKTVYQSIQPIYPARIQTGDNLFKCTDAVKSFNHIIHFGDHKGIHTGEKLYEYKECHQIFNQSPSFNEHPRLHVGENQYNYKEYENIFYFSSFMEHQKIGTVEKAYKYNEWEKVFGYDSFLTQHTSTYTAEKPYDYNECGTSFIWSSYLIQHKKTHTGEKPYECDKCGKVFRNRSALTKHERTHTGIKPYECNKCGKAFSWNSHLIVHKRIHTGEKPYVCNECGKSFNWNSHLIGHQRTHTGEKPFECTECGKSFSWSSHLIAHMRMHTGEKPFKCDECEKAFRDYSALSKHERTHSGAKPYKCTECGKSFSWSSHLIAHQRTHTGEKPYNCQECGKAFRERSALTKHEIIHSGIKPYECNKCGKSCSQMAHLVRHQRTHTGEKPYECNKCGKSFSQSCHLVAHRRIHTGEKPYKCNQCERSFNCSSHLIAHRRTHTGEKPYRCNECGKAFNESSSLIVHLRNHTGEKPYKCNHCEKAFCKNSSLIIHQRMHSGEKRFICSECGKAFSGHSALLQHQRNHSEEKLN

SEQ ID NO: 16292 - protein, 696 aa, Homo Sapiens
MSYGSITFGDVAIDFSHQEWEYLSLVQKTLYQEVMMENYDNLVSLAGHSVSKPDLITLLEQGKEPWMIVREETRGECTDLDSRCEIISDGKMQLYRKHSCVTLHQRIHNGQKPYECKQCQKSFSHLTELMVHQTIHTSEEPDQCEKFRKAFSHLTDLRKHQKINAREKPYECEECGKVFSYPANLAQHGKVHVEKPYECKECGEAFRTSRQLTVHHRFHYGEKPYECKECGKAFSVYGRLSRHQSIHTGEKPFECNKCGKSFRLKAGLKVHQSIHTGEKPHECKECGKAFRQFSHLVGHKRIHTGEKPYECKECGKGFTCRYQLTMHQRIYSGEKHYECKENGEAFSSGHQLTAPHTFESVEKPYKCEECGKAFSVHGRLTRHQGIHSGKKPYECNKCGKSFRLNSSLKIHQNIHTGEKPYKCKECGKAFSQRAHLAHHNRIHTGYKPFECKECGKSFRCASYLVIHERIHTGEKPYVCQECGKGFSYSHKLTIHRRVHTGEKPYECKECGKAFSVSGQLTQHLSIHSGKKPFECNKCGKSFRFISVLKAHQNIHSAEKPYECKECGKAFRHATSLIYHDRTHAGEKSYECKECGETFSHASHLIIHERIHTSDKPYECKRCGKAFHCASYLVRHESVHADGNPYMCEECGKAFNSSHELSIHHRVHTGEKPFKCNKCRRSFRLRSILEVHQRIHI

SEQ ID NO: 16293 - protein, 1512 aa, Homo Sapiens
MSVNISTAGKGVDPNTVDTYDSGDDWEIGVGNLIIDLDADLEKDRQKFEMNNSTTTTSSSNSKDCGGPASSGAGATAALADGLKFASVQASAPQGNSHKETSKSKVKRSKTSKDANKSLPSAALYGIPEISSTGKRQEVQGRPGEATGMNSALGQSVSSGGSGNPNSNSTSTSTSAATAGAGSCGKSKEEKPGKSQSSRGAKRDKDAGKSRKDKHDLLQGHQNGSGSQAPSGGHLYGFGAKSNGGGASPFHCGGTGSGSVAAAGEVSKSAPDSGLMGNSMLVKKEEEEEESHRRIKKLKTEKVDPLFTVPAPPPPISSSLTPQILPSYFSPSSSNIAAPVEQLLVRTRSVGVNTCEVGVVTEPECLGPCEPGTSVNLEGIVWHETEEGVLVVNVTWRNKTYVGTLLDCTKHDWAPPRFCESPTSDLEMRGGRGRGKRARSAAAAPGSEASFTESRGLQNKNRGGANGKGRRGSLNASGRRTPPNCAAEDIKASPSSTNKRKNKPPMELDLNSSSEDNKPGKRVRTNSRSTPTTPQGKPETTFLDQGCSSPVLIDCPHPNCNKKYKHINGLRYHQAHAHLDPENKLEFEPDSEDKISDCEEGLSNVALECSEPSTSVSAYDQLKAPASPGAGNPPGTPKGKRELMSNGPGSIIGAKAGKNSGKKKGLNNELNNLPVISNMTAALDSCSAADGSLAAEMPKLEAEGLIDKKNLGDKEKGKKATNCKTDKNLSKLKSARPIAPAPAPTPPQLIAIPTATFTTTTTGTIPGLPSLTTTVVQATPKSPPLKPIQPKPTIMGEPITVNPALVSLKDKKKKEKRKLKDKEGKETGSPKMDAKLGKLEDSKGASKDLPGHFLKDHLNKNEGLANGLSESQESRMASIKAEADKVYTFTDNAPSPSIGSASRLECSTLVNGQAPMAPLHVLTQNGAESSAAKTSSPAYSDISDAADDGGSDSRSEGMRSKASSPSDIISSKDSVVKGHSSTTAQSSQLKESHSPYYHSYDPYYSPSYMHPGQVGAPAAGNSGSTQGMKIKKESEEDAEKKDKAEQLDSKKVDHNSASLQPQHQSVITQRHPALAQSLYYGQYAYGLYMDQKSLMATSPAYRQQYEKYYEDQRLAEQKMAQTGRGDCERKSELPLKELGKEETKQKNMPSATISKAPSTPEPNKNHSKLGPSVPNKTEETGKSQLLSNHQQQLQADSFKAKQMENHQLIKEAVEMKSVMDSMKQTGVDPTSRFKQDPDSRTWHHYVYQPKYLDQQKSEELDREKKLKEDSPRKTPNKESGVPSLPVSLTSIKEEPKEAKHPDSQSMEESKLKNDDRKTPVNWKDSRGTRVAVSSPMSQHQSYIQYLHAYPYPQMYDPSHPAYRAVSPVLMHSYPGAYLSPGFHYPVYGKMSGREETEKVNTSPSVNTKTTTESKALDLLQQHANQYRSKSPAPVEKATAEREREAERERDRHSPFGQRHLHTHHHTHVGMGYPLIPGQYDPFQGLTSAALVASQQVAAQASASGMFPGQRRE

SEQ ID NO: 16294 - protein, 1411 aa, Homo Sapiens
MSLSSGASGGKGVDANPVETYDSGDEWDIGVGNLIIDLDADLEKDQQKLEMSGSKEVGIPAPNAVATLPDNIKFVTPVPGPQGKEGKSKSKRSKSGKDTSKPTPGTSLFTPSEGAASKKEVQGRSGDGANAGGLVAAIAPKGSEKAAKASRSVAGSKKEKENSSSKSKKERSEGVGTCSEKDPGVLQPVPLGGRGGQYDGSAGVDTGAVEPLGSIAIEPGAALNPLGTKPEPEEGENECRLLKKVKSEKMESPVSTPAVLPIHLLVPVVNNDISSPCEQIMVRTRSVGVNTCDVALATEPECLGPCEPGTSVNLEGIVWQETEDGMLVVNVTWRNKTYVGTLLDCTRHDWAPPRFCDSPTSDLEMRNGRGRGKRMRPNSNTPVNETATASDSKGTSNSSKTRAGANSKGRRGSQNSSEHRPPASSTSEDVKASPSSANKRKNKPLSDMELNSSSEDSKGSKRVRTNSMGSATGPLPGTKVEPTVLDRNCPSPVLIDCPHPNCNKKYKHINGLKYHQAHAHTDDDSKPEADGDSEYGEEPILHADLGSCNGASVSQKGSLSPARSATPKVRLVEPHSPSPSSKFSTKGLCKKKLSGEGDTDLGALSNDGSDDGPSVMDETSNDAFDSLERKCMEKEKCKKPSSLKPEKIPSKSLKSARPIAPAIPPQQIYTFQTATFTAASPGSSSGLTATVAQAMPNSPQLKPIQPKPTVMGEPFTVNPALTPAKDKKKKDKKKKESSKELESPLTPGKVCRAEEGKSPFRESSGDGMKMEGLLNGSSDPHQSRLASIKAEADKIYSFTDNAPSPSIGGSSRLENTTPTQPLTPLHVVTQNGAEASSVKTNSPAYSDISDAGEDGEGKVDSVKSKDAEQLVKEGAKKTLFPPQPQSKDSPYYQGFESYYSPSYAQSSPGALNPSSQAGVESQALKTKRDEEPESIEGKVKNDICEEKKPELSSSSQQPSVIQQRPNMYMQSLYYNQYAYVPPYGYSDQSYHTHLLSTNTAYRQQYEEQQKRQSLEQQQRGVDKKAEMGLKEREAALKEEWKQKPSIPPTLTKAPSLTDLVKSGPGKAKEPGADPAKSVIIPKLDDSSKLPGQAPEGLKVKLSDASHLSKEASEAKTGAECGRQAEMDPILWYRQEAEPRMWTYVYPAKYSDIKSEDERWKEERDRKLKEERSRSKDSVPKEDGKESTSSDCKLPTSEESRLGSKEPRPSVHVPVSSPLTQHQSYIPYMHGYSYSQSYDPNHPSYRSMPAVMMQNYPGSYLPSSYSFSPYGSKVSGGEDADKARASPSVTCKSSSESKALDILQQHASHYKSKSPTISDKTSQERDRGGCGVVGGGGSCSSVGGASGGERSVDRPRTSPSQRLMSTHHHHHHLGYSLLPAQYNLPYAAGLSSTAIVASQQGSTPSLYPPPRR

SEQ ID NO: 16295 - protein, 462 aa, Homo Sapiens
MLCDEEAQKRKAKESGMALPQGRLTFMDVAIEFSQEEWKSLDPGQRALYRDVMLENYRNLVFLGICLPDLSIISMLKQRREPLILQSQVKIVKNTDGRECVRSVNTGRSCVLGSNAENKPIKNQLGLTLEAHLSELQLFQAGRKIYRSNQVEKFTNHRSSVSPLQKISSSFTTHIFNKYRNDLIDFPLLPQEEKAYIRGKSYEYECSEDGEVFRVRASLTNHQVIHTAEKPYKCTECGKVFSRNSHLVEHWRIHTGQKPYKCSECDKVFNRNSNLARHQRIHTGEKPHKCNECGKAFRECSGLTTHLVIHTGEKPYKCNECGKNFRHKFSLTNHQRSHTAEKPYKCNECGKVFSLLSYLARHQIIHSTEKPYKCNECGRAFHKRPGLMAHLLIHTGEKPYKCNECDKVFGRKLYLTNHQRIHTGERPYKCNACGKVFNQNPHLSRHRKIHAGENSLRTLQME

SEQ ID NO: 16296 - protein, 705 aa, Homo Sapiens
MLREEAAQKRKGKEPGMALPQGRLTFRDVAIEFSLAEWKCLNPSQRALYREVMLENYRNLEAVDISSKCMMKEVLSTGQGNTEVIHTGTLQRHESHHIGDFCFQEIEKEIHDIEFQCQEDERNGLEAPMTKIKKLTGSTDQHDHRHAGNKPIKDQLGSSFYSHLPELHIFQIKGEIGNQLEKSTNDAPSVSTFQRISCRPQTQISNNYGNNPLNSSLLPQKQEVHMREKSFQCNKSGKAFNCSSLLRKHQIPHLGDKQYKCDVCGKLFNHEQYLACHDRCHTVEKPYKCKECGKTFSQESSLTCHRRLHTGVKRYNCNECGKIFGQNSALLIDKAIDTGENPYKCNECDKAFNQQSQLSHHRIHTGEKPYKCEECDKVFSRKSTIETHKRIHTGEKPYRCKVCDTAFTWHSQLARHRRIHTAKKTYKCNECGKTFSHKSSLVCHHRLHGGEKSYKCKVCDKAFVWSSQLAKHTRIDCGEKPYKCNECGKTFGQNSDLLIHKSIHTGEQPYKCDECEKVFSRKSSLETHKIGHTGEKPYKCKVCDKAFACHSYLAKHTRIHSGEKPYKCNECSKTFSHRSYLVCHHRVHSGEKPYKCNECSKTFSRRSSLHCHRRLHSGEKPYKCNECGNTFRHCSSLIYHRRLHTGEKSYKCTICDKAFVRNSLLSRHTRIHTAEKPYKCNECGKAFNQQSHLSRHHRIHTGEKP

SEQ ID NO: 16297 - protein, 617 aa, Homo Sapiens
MIKSQESLTLEDVAVEFTWEEWQLLGPAQKDLYRDVMLENYSNLVSVGYQASKPDALFKLEQGEPWTVENEIHSQICPEIKKVDNHLQMHSQKQRCLKRVEQCHKHNAFGNIIHQRKSDFPLRQNHDTFDLHGKILKSNLSLVNQNKRYEIKNSVGVNGDGKSFLHAKHEQFHNEMNFPEGGNSVNTNSQFIKHQRTQNIDKPHVCTECGKAFLKKSRLIYHQRVHTGEKPHGCSICGKAFSRKSGLTEHQRNHTGEKPYECTECDKAFRWKSQLNAHQKIHTGEKSYICSDCGKGFIKKSRLINHQRVHTGEKPHGCSLCGKAFSKRSRLTEHQRTHTGEKPYECTECDKAFRWKSQLNAHQKAHTGEKSYICRDCGKGFIQKGNLIVHQRIHTGEKPYICNECGKGFIQKGNLLIHRRTHTGEKPYVCNECGKGFSQKTCLISHQRFHTGKTPFVCTECGKSCSHKSGLINHQRIHTGEKPYTCSDCGKAFRDKSCLNRHRRTHTGERPYGCSDCGKAFSHLSCLVYHKGMLHAREKCVGSVKLENPCSESHSLSHTRDLIQDKDSVNMVTLQMPSVAAQTSLTNSAFQAESKVAIVSQPVARSSVSADSRICTE

SEQ ID NO: 16298 - protein, 585 aa, Homo Sapiens
MIKTQESLTLEDVAVEFSWEEWQLLDTAQKNLYRDVMVENYNHLVSLGYQTSKPDVLSKLAHGQEPWTTDAKIQNKNCPGIGKVDSHLQEHSPNQRLLKSVQQCNGQNTLRNIVHLSKTHFPIVQNHDTFDLYRKNLKSSLSLINQKRRHGINNPVEFIGGEKTLLHGKHERTHTKTRFSENAKCIHTKFQVFKHQRTQKIEKPHACIECEQTFLRKSQLIYHENICIQENPGSGQCEKLSRSVLFTKHLKTNTTDKICIPNEYRKGSTVKSSLITHQQTHTEEKSYMCSECGKGFTMKRYLIAHQRTHSGEKPYVCKECGKGFTVKSNLIVHQRTHTGEKPYICSECGKGFTMKRYLVVHQRTHTGEKPYMCSECGKGFTVKSNLIVHQRSHTGEKSYICSECGKGFTVKRTLVIHQRTHTGEKSYICNECGKGFTTKRTLIIHQRTHTGEKPYECNECGKAFSQKICLIQHERCHTGKTPFVCTECGKSYSHKYGLITHQRIHTGEKPYECNECGKAFTTKSVLNVHQRTHTGERPYGCSDCEKAFSHLSNLVKHKKMHTREMGRISQVENSCNGESQLLPYK

SEQ ID NO: 16299 - protein, 731 aa, Homo Sapiens
MMQAQESLTLEDVAVDFTWEEWQFLSPAQKDLYRDVMLENYSNLVAVGYQASKPDALSKLERGEETCTTEDEIYSRICSEIRKIDDPLQHHLQNQSIQKSVKQCHEQNMFGNIVNQNKGHFLLKQDCDTFDLHEKPLKSNLSFENQKRSSGLKNSAEFNRDGKSLFHANHKQFYTEMKFPAIAKPINKSQFIKQQRTHNIENAHVCSECGKAFLKLSQFIDHQRVHTGEKPHVCSMCGKAFSRKSRLMDHQRTHTELKHYECTECDKTFLKKSQLNIHQKTHMGGKPYTCSQCGKAFIKKCRLIYHQRTHTGEKPHGCSVCGKAFSTKFSLTTHQKTHTGEKPYICSECGKGFIEKRRLTAHHRTHTGEKPFICNKCGKGFTLKNSLITHQQTHTGEKLYTCSECGKGFSMKHCLMVHQRTHTGEKPYKCNECGKGFALKSPLIRHQRTHTGEKPYVCTECRKGFTMKSDLIVHQRTHTAEKPYICNDCGKGFTVKSRLIVHQRTHTGEKPYVCGECGKGFPAKIRLMGHQRTHTGEKPYICNECGKGFTEKSHLNVHRRTHTGEKPYVCSECGKGLTGKSMLIAHQRTHTGEKPYICNECGKGFTMKSTLSIHQQTHTGEKPYKCNECDKTFRKKTCLIQHQRFHTGKTSFACTECGKFSLRKNDLITHQRIHTGEKPYKCSDCGKAFTTKSGLNVHQRKHTGERPYGCSDCGKAFAHLSILVKHRRIHR

SEQ ID NO: 16300 - protein, 781 aa, Homo Sapiens
MATQGHLTFKDVAIEFSQEEWKCLEPVQKALYKDVMLENYRNLVFLGISPKCVIKELPPTENSNTGERFQTVALERHQSYDIENLYFREIQKHLHDLEFQWKDGETNDKEVPVPHENNLTGKRDQHSQGDVENNHIENQLTSNFESRLAELQKVQTEGRLYECNETEKTGNNGCLVSPHIREKTYVCNECGKAFKASSSLINHQRIHTTEKPYKCNECGKAFHRASLLTVHKVVHTRGKSYQCDVCGKIFRKNSYFVRHQRSHTGQKPYICNECGKSFSKSSHLAVHQRIHTGEKPYKCNLCGKSFSQRVHLRLHQTVHTGERPFKCNECGKTFKRSSNLTVHQVIHAGKKPYKCDVCGKAFRHRSNLVCHRRIHSGEKQYKCNECGKVFSKRSSLAVHRRIHTVEKPCKCNECGKVFSKRSSLAVHQRIHTGQKTYKCNKCGKVYSKHSHLAVHWRIHTGEKAYKCNECGKVFSIHSRLAAHQRIHTGEKPYKCNECGKVFSQHSRLAVHRRIHTGEKPYKCKECGKVFSDRSAFARHRRIHTGEKPYKCKECGKVFSQCSRLTVHRRIHSGEKPYKCNECGKVYSQYSHLVGHRRVHTGEKPYKCHECGKAFNQGSTLNRHQRIHTGEKPYKCNQCGNSFSQRVHLRLHQTVHTGDRPYKCNECGKTFKRSSNLTAHQIIHAGKKPYKCDECGKVFRHSSHLVSHQRIHTGEKRYKCIECGKAFGRLFSLSKHQRIHSGKKPYKCNECGKSFICRSGLTKHRIRHTGESLTTKLNVTRP

SEQ ID NO: 16301 - protein, 954 aa, Homo Sapiens
MNQPGGAAAPQADGASAAGRKSTASRERLKRSQKSTKVEGPEPVPAEASLSAEQGTMTEVKVKTELPDDYIQEVIWQGEAKEEKKAVSKDGTSDVPAEICVVIGGVRNQQTLDGKAPEGSPHGGSVRSRYSGTWIFDQALRYASGSYECGICGKKYKYYNCFQTHVRAHRDTEATSGEGASQSNNFRYTCDICGKKYKYYSCFQEHRDLHAVDVFSVEGAPENRADPFDQGVVATDEVKEEPPEPFQKIGPKTGNYTCEFCGKQYKYYTPYQEHVALHAPISTAPGWEPPDDPDTGSECSHPEVSPSPRFVAAKTQTNQSGKKAPASVVRCATLLHRTPPATQTQTFRTPNSGSPASKATAAESAFSRRVEGKAQNHFEETNSSSQNSSEPYTCGACGIQFQFYNNLLEHMQSHAADNENNIASNQSRSPPAVVEEKWKPQAQRNSANNTTTSGLTPNSMIPEKERQNIAERLLRVMCADLGALSVVSGKEFLKLAQTLVDSGARYGAFSVTEILGNFNTLALKHLPRMYNQVKVKVTCALGSNACLGIGVTCHSQSVGPDSCYILTAYQAEGNHIKSYVLGVKGADIRDSGDLVHHWVQNVLSEFVMSEIRTVYVTDCRVSTSAFSKAGMCLRCSACALNSVVQSVLSKRTLQARSMHEVIELLNVCEDLAGSTGLAKETFGSLEETSPPPCWNSVTDSLLLVHERYEQICEFYSRAKKMNLIQSLNKHLLSNLAAILTPVKQAVIELSNESQPTLQLVLPTYVRLEKLFTAKANDAGTVSKLCHLFLEALKENFKVHPAHKVAMILDPQQKLRPVPPYQHEEIIGKVCELINEVKESWAEEADFEPAAKKPRSAAVENPAAQEDDRLGKNEVYDYLQEPLFQATPDLFQYWSCVTQKHTKLAKLAFWLLAVPAVGARSGCVNMCEQALLIKRRRLLSPEDMNKLMFLKSNML

SEQ ID NO: 16302 - protein, 560 aa, Homo Sapiens
MGQPAPYAEGPIQGGDAGELCKCDFLVSISIPQTRSDIPAGARRSSMGPRSLDTCWGRGPERHVHRLECNGVIFTHRNLCLPGGKTKTENEEKTAQLNISKESESHRLIVEGLLMDVPQHPDFKDRLEKSQLHDTGNKTKIGDCTDLTVQDHESSTTEREEIARKLEESSVSTHLITKQGFAKEQVFYKCGECGSYYNPHSDFHLHQRVHTNEKPYTCKECGKTFRYNSKLSRHQKIHTGEKPYSCEECGQAFSQNSHLLQHQKLHGGQRPYECTDCGKTFSYNSKLIRHQRIHTGEKPFKCKECGKAFSCSYDCIIHERIHNGEKPYECKECGKSLSSNSVLIQHQRIHTGEKPYECKECGKAFHRSSVFLQHQRFHTGEQLYKCNECWKTFSCSSRFIVHQRIHNGEKPYECQECGKTFSQKITLVQHQRVHTGEKPYECKECGKAFRWNASFIQHQKWHTRKKLINGTGLSAVKPYCPCAILSPLPPQHTCSALAPPGPPLSSSHAVVLPPSVPFFLLLPSSEKANPSPVQIAHFFQDLAFPGKSSLQSPNPLSHSL

SEQ ID NO: 16303 - protein, 422 aa, Homo Sapiens
MFQTAWRQEPVTFEDVAVYFTQNEWASLDSVQRALYREVMLENYANVASLAFPFTTPVLVSQLEQGELPWGLDPWEPMGREALRGICPGDEARTEKEGLTPKDHVSKETESFRLMVGGLPGNVSQHLDFGSSLEQPQGHWIIKTKSKRRHFTDTSARHHEAYEVKNGEKFEKLGKNISVSTQLTTNQTNPSGQISYECGQCGRYFIQMADFHRHEKCHTGEKSFECKECGKYFRYNSLLIRHQIIHTGKKPFKCKECGKGLSSDTALIQHQRIHTGEKPYECKECGKAFSSSSVFLQHQRFHTGEKLYECNECWKTFSCSSSFTVHQRMHTGEKPYECKECGKRLSSNTALTQHQRIHTGEKPFECKECGKAFNQKITLIQHQRVHTGEKPYECKVCGKTFSWCGRFILHQKLHTQKTPVQA

SEQ ID NO: 16304 - protein, 439 aa, Homo Sapiens
MLQTTWPQESVTFEDVAVYFTQNQWASLDPAQRALYGEVMLENYANVASLVAFPFPKPALISHLERGEAPWGPDPWDTEILRGISQGGESWIKNEGLVIKQEASEETELHRMPVGGLLRNVSQHFDFKRKALKQTFNLNPNLILRGGMKFYECKECGKIFRYNSKLIRHQMSHTGEKPFKCKECGKAFKSSYDCIVHEKNHIGEGPYECKECGKGLSSNTALTQHQRIHTGEKPYECKECGKAFRRSAAYLQHQRLHTGEKLYKCKECWKAFGCRSLFIVHQRIHTGEKPYQCKECGKAFTQKIASIQHQRVHTGEKPYECKVCGKAFKWYGSFVQHQKLHPVEKKPVKVLGPSLVSPQCSSPAIPPVLLQGSCSASAVAVPSLTFPHAVLIPTSGNFFMLLPTSGIPSSSAQIVRVFQGLTPTVKPSPVILTPSSHSS

SEQ ID NO: 16305 - protein, 477 aa, Homo Sapiens
MATYTCITCRVAFRDADMQRAHYKTDWHRYNLRRKVASMAPVTAEGFQERVRAQRAVAEEESKGSATYCTVCSKKFASFNAYENHLKSRRHVELEKKAVQAVNRKVEMMNEKNLEKGLGVDSVDKDAMNAAIQQAIKAQPSMSPKKAPPAPAKEARNVVAVGTGGRGTHDRDPSEKPPRLQWFEQQAKKLAKQQEEDSEEEEEDLDGDDWEDIDSDEELECEDTEAMDDVVEQDAEEEEAEEGPPLGAIPITDCLFCSHHSSSLMKNVAHMTKDHSFFIPDIEYLSDIKGLIKYLGEKVGVGKICLWCNEKGKSFYSTEAVQAHMNDKSHCKLFTDGDAALEFADFYDFRSSYPDHKEGEDPNKAEELPSEKNLEYDDETMELILPSGARVGHRSLMRYYKQRFGLSRAVAVAKNRKAVGRVLQQYRALGWTGSTGAALMRERDMQYVQRMKSKWMLKTGMKNNATKQMHFRVQVRF

SEQ ID NO: 16306 - protein, 536 aa, Homo Sapiens
MILLSFVSDSNVGTGEKKVTEAWISEDENSHRTTSDRLTVMELPSPESEEVHEPRLGELLGNPEGQSLGSSPSQDRGCKQVTVTHWKIQTGETAQVCTKSGRNHILNSDLLLLQRELIEGEANPCNICGKTFTFNSDLVRHRISHAGEKPYTCDQCGKGFGQSSHLMEHQRIHTGERLYVCNVCGKDFIHYSGLIEHQRVHSGEKPFKCAQCGKAFCHSSDLIRHQRVHTRERPFECKECGKGFSQSSLLIRHQRIHTGERPYECNECGKSFIRSSSLIRHYQIHTEVKQYECKECGKAFRHRSDLIEHQRIHTGERPFECNECGKAFIRSSKLIQHQRIHTGERPYVCNECGKRFSQTSNFTQHQRIHTGEKLYECNECGKAFFLSSYLIRHQKIHTGERVYECKECGKAFLQKAHLTEHQKIHSGDRPFECKDCGKAFIQSSKLLLHQIIHTGEKPYVCSYCGKGFIQRSNFLQHQKIHTEEKLYECSQYGRDFNSTTNVKNNQRVHQEGLSLSKAPIHLGERSVDKGEHTGNL

SEQ ID NO: 16307 - protein, 865 aa, Homo Sapiens
MSLQDSTLSREGKPEGEIMAAVFFSVGRLSPEVTQPDEDLHLQAEETQLVKESVTFKDVAIDFTLEEWRLMDPTQRNLHKDVMLENYRNLVSLGLAVSKPDMISHLENGKGPWVTVREISRIPYPDMEPKPATKKATRTKAISEDLSQEAILEKLTENGLWDSRMEGLWKWNDRILRLQNNQENHLSQRIIPLKKTPTSQRGFRFESILIPEPGIATEELHSRCQTQEENFTENLNLITDTHLGKIICKEMKGSKAIRQTSELTLGKKSNNKEKPYKCSTCEKAFHYRSLLIQHQRTHTKEKPYECNECGKTFSQPSYLSQHKKIHTGEKPYKCNECGKAFIASSSLMVHQRIHTKEKPYQCNVCGKSFSQCARLNQHQRIQTGEKPYKCSECGKAFSDKSKLARHQETHNGEKPYKCDDCGKAFRNKSYLSVHQKTHTEEKPYQCNECGKSFKNTTIFNVHQRIHTGEKPFRCNECGKAYRSNSSLIVHIRTHTGEKPYECNECGKAFNRIANFTEHQRIHTGEKPYKCNECGKAFINYSCLTVHHRMHTGEKPYKCTECGKAFMRSSSLIIHQRIHTEEKPYLCNECGESFRIKSHLTVHQRIHTGEKPYKCTDCERAFTKMVNLKEHQKIHTGVKPYKCYDCGKSFRTKSYLIVHQRTHTGEKPYKCNECEKAFTNTSQLTVHQRRHTGEKPYKCNECGKVFTSNSGFNTHQRTHTGEKPFKCNDCGKAFSQMVHVTEHQKIHSGEKPYKCDVCGKAFRRGSYLTVHWRTHTGEKPYTCKECGKGCITLSQLTLHQRIHTGERPYKCEECGKAFRTNSDFTVHLRMHTGEKPYKCNECGKAFRSSSSLTVHQRIHQRETQLI

SEQ ID NO: 16308 - protein, 306 aa, Homo Sapiens
MGERLLESKKDHQHGEILTQVPDDMLKKKTPRVKSCGEVSVGHASLNRHHRADTGHKPYEYQEYGQKPYKCTYCKKAFSDLPYFRTHEWAHTGGKPYDCEECGKSFISRSSIRRHRIMHSGDGPYKCNFCGKALMCLSLYLIHKRTHTGEKPYECKQCGKAFSHSGSLRIHERTHTGEKPYECSECGKAFHSSTCLHAHKITHTGEKPYECKQCGKAFVSFNSVRYHERTHTGEKPYECKQCGKAFRSASHLRTHGRTHTGEKPYECKQCGKAFGCASSVKIHERTHTGEKPCSSNTSKGQGEKIA

SEQ ID NO: 16309 - protein, 528 aa, Homo Sapiens
MGPLQFRDVAIEFSLEEWHCLDTAQRNLYRNVMLENYSNLVFLGITVSKPDLITCLEQGRKPLTMKRNEMIAKPSVMCSHFAQDLWPEQSMKDSFQKVVLRRYEKCEHDNLQLKKGCISVDECKVHKEGYNELNQCLTTTPRKICQCDKYVKVLHQFPNSNGQKRGHTGKKPFKYIECGKAFKQFSTLTTHKKIHTGGKPYKCEECGKAFNHSCSLTRHKKIHTGEKPYKCEECGKAFKHSSTLTTHKRNHTGEKPYKCDKCGKAFMSSSTLSKHEIIHTEKKPYKCEECGKAFNRSSTLTTHKIIHTGEKPYKCEECDKAFKYSYTLTTHKRIHTEDKPYKCEECGKAFKYSSTLTTHKRIHTGEKPYKCEECGKAFKRSSDLTTHKIIHTGEKPYKCEECGKAFKYSSNLTTHKKIHTGERPYKCEECGKAFNQSSILTTHRRIHTGEKFYKCEECGKAFKCSSNLTTHKKIHTGERPYKCEECGKAFNQSSILTTHERIILERNSTNVKNVAKPSSGPHTLLHIR

SEQ ID NO: 16310 - protein, 461 aa, Homo Sapiens
MDSVAFEDVAVNFTLEEWALLDPSQKNLYRDVMRETFRNLASVGKQWEDQNIEDPFKIPRRNISHIPERLCESKEGGQGEETFSQIPDGILNKKTPGVKPCESSVCGEVGMGPSSLNRHIRDHTGREPNEYQEYGKKSYTRNQCGRALSYHRSFPVRERTHPGGKPYDCKECGETFISLVSIRRHMLTHRGGVPYKCKVCGKAFDYPSLFRIHERSHTGEKPYECKQCGKAFSCSSYIRIHERTHTGDKPYECKQCGKAFSCSKYIRIHERTHTGEKPYECKQCGKAFRCASSVRSHERTHTGEKLFECKECGKALTCLASVRRHMIKHTGNGPYKCKVCGKAFDFPSSFRIHERTHTGEKPYDCKQCGKAFSCSSSFRKHERIHTGEKPYKCTKCGKAFSRSSYFRIHERTHTGEKPYECKQCGKAFSRSTYFRVHEKIHTGEKPYENPNPNASVVPVLS

SEQ ID NO: 16311 - protein, 1059 aa, Homo Sapiens
MSGVMVGSHADMAPASTAEGAGEKPGPAAPAPAAQYECGECGKSFRWSSRLLHHQRTHTGERPYKCPDCPKAFKGSSALLYHQRGHTGERPYQCPDCPKAFKRSSLLQIHRSVHTGLRAFICGQCGLAFKWSSHYQYHLRQHTGERPYPCPDCPKAFKNSSSLRRHRHVHTGERPYTCGVCGKSFTQSTNLRQHQRVHTGERPFRCPLCPKTFTHSSNLLLHQRTHGAAPAPGTASAAPPPQSREPGKVFVCDAYLQRHLQPHSPPAPPAPPPPPPPVVPELFLAAAETTVELVYRCDGCEQGFSSEELLLEHQPCPGPDAAPQPQEAPAEAPKADQPPSPLPQPPPPAAAPAPGFACLPCGKSFRTVAGLSRHQHSHGAAGGQAFRCGSCDGSFPQLASLLAHQQCHVEEAAAGRPPPQAEAAEVTCPQEPLAPAAPVPPPPPSAPASAERPYKCAECGKSFKGSSGLRYHLRDHTGERPYQCGECGKAFKRSSLLAIHQRVHTGLRAFTCGQCGLTFKWSSHYQYHLRLHSGERPYACGECGKAFRNTSCLRRHRHVHTGERPHACGVCGKSFAQTSNLRQHQRVHTGERPFRCPLCPKTFTHSSNLLLHQRTHSAERPFTCPICGRGFVMAAYLQRHLRTHAPANTPPSTTAPAAGPQPPAPLAAARAPPATQDVHVLPHLQATLSLEVAGGTAQAPSLGPAAPNSQTFLLVQTAQGLQLIPSSVQPPTPPPPPAPPKLILLPSSSAGAGGGRARQGPRAVGKAGQGAGVVWLPGPGGLGVQGAASAGASGTGQSLIVLQNVGGGEAGPQEMSGVQLQPLRPAPEVTTVQLQPAQEVTTVQLQPAQEVTTVQLQPAQEVTTVQLQPVAGQLSNSSGGAVATEAPNLLVVQSGAAEELLTGPGPGEAGDGEASTGVVQDVLFETLQTDEGLQSVLVLSGADGEQTRLCVQEVETLPPGLTEPPATGPPGQKLLIIRSAPATELLDSSNTGGGTATLQLLAPPPSGPASGPAGLPGAPASQMVQVVPAGAGPGVMTPQGLPSIQIVQTLPAVQLVHTF

SEQ ID NO: 16312 - protein, 869 aa, Homo Sapiens
MEPETALWGPDLQGPEQSPNDAHRGAESENEEESPRQESSGEEIIMGDPAQSPESKDSTEMSLERSSQDPSVPQNPPTPLGHSNPLDHQIPLDPPAPEVVPTPSDWTKACEASWQWGALTTWNSPPVVPANEPSLRELVQGRPAGAEKPYICNECGKSFSQWSKLLRHQRIHTGERPNTCSECGKSFTQSSHLVQHQRTHTGEKPYKCPDCGKCFSWSSNLVQHQRTHTGEKPYKCTECEKAFTQSTNLIKHQRSHTGEKPYKCGECRRAFYRSSDLIQHQATHTGEKPYKCPECGKRFGQNHNLLKHQKIHAGEKPYRCTECGKSFIQSSELTQHQRTHTGEKPYECLECGKSFGHSSTLIKHQRTHLREDPFKCPVCGKTFTLSATLLRHQRTHTGERPYKCPECGKSFSVSSNLINHQRIHRGERPYICADCGKSFIMSSTLIRHQRIHTGEKPYKCSDCGKSFIRSSHLIQHRRTHTGEKPYKCPECGKSFSQSSNLITHVRTHMDENLFVCSDCGKAFLEAHELEQHRVIHERGKTPARRAQGDSLLGLGDPSLLTPPPGAKPHKCLVCGKGFNDEGIFMQHQRIHIGENPYKNADGLIAHAAPKPPQLRSPRLPFRGNSYPGAAEGRAEAPGQPLKPPEGQEGFSQRRGLLSSKTYICSHCGESFLDRSVLLQHQLTHGNEKPFLFPDYRIGLGEGAGPSPFLSGKPFKCPECKQSFGLSSELLLHQKVHAGGKSSQKSPELGKSSSVLLEHLRSPLGARPYRCSDCRASFLDRVALTRHQETHTQEKPPNPEDPPPEAVTLSTDQEGEGETPTPTESSSHGEGQNPKTLVEEKPYLCPECGAGFTEVAALLLHRSCHPGVSL

SEQ ID NO: 16313 - protein, 485 aa, Homo Sapiens
MNEYPKKRKRKTLHPSRYSDSSGISRIADGFNGIFSDHCYSVCSMRQPDLKYFDNKDDDSDTETSNDLPKFADGIKARNRNQNYLVPSPVLRILDHTAFSTEKSADIVICDEECDSPESVNQQTQEESPIEVHTAEDVPIAVEVHAISEDYDIETENNSSESLQDQTDEEPPAKLCKILDKSQALNVTAQQKWPLLRANSSGLYKCELCEFNSKYFSDLKQHMILKHKRTDSNVCRVCKESFSTNMLLIEHAKLHEEDPYICKYCDYKTVIFENLSQHIADTHFSDHLYWCEQCDVQFSSSSELYLHFQEHSCDEQYLCQFCEHETNDPEDLHSHVVNEHACKLIELSDKYNNGEHGQYSLLSKITFDKCKNFFVCQVCGFRSRLHTNVNRHVAIEHTKIFPHVCDDCGKGFSSMLEYCKHLNSHLSEGIYLCQYCEYSTGQIEDLKIHLDFKHSADLPHKCSDCLMRFGNERELISHLPVHETT

SEQ ID NO: 16314 - protein, 438 aa, Homo Sapiens
MQAEDRSQFGSAAEMLSEQTAALGTGWESMNVQLDGAEPQVERGSQEERPWRTVPGPLEHLCCDLEEEPQSLQEKAQSAPWVPAIPQEGNTGDWEMAAALLAAGSQGLVTIKDVSLCFSQEEWRSLDPSQTDFYGEYVMQENCGIVVSLRFPIPKLDMLSQLEGGEEQWVPDPQDLEERDILRVTYTGDGSEHEGDTPELEAEPPRMLSSVSEDTVLWNPEHDESWDSMPSSSRGMLLGPPFLQEDSFSNLLCSTEMDSLLRPHTCPQCGKQFVWGSHLARHQQTHTGERPYSCLKCEKTFGRRHHLIRHQKTHLHDKTSRCSECGKNFRCNSHLASHQRVHAEGKSCKGQEVGESPGTRKRQRAPPVPKCHVCTECGKSFGRRHHLVRHWLTHTGEKPFQCPRCEKSFGRKHHLDRHLLTHQGQSPRNSWDRGTSVF

SEQ ID NO: 16315 - protein, 1327 aa, Homo Sapiens
MRSFLQQDVNKTKSRLNVLNGLANNMDDLKINTDITGAKEELLDDNNFISDKESGVHKPKDCQTSFQKNNTLTLPEELSKDKSENALSGGQSSLFIHAGAPTVSSENFILPKGAAVNGPVSHSSLTKTSNMNKGSVSLTTGQPVDQPTTESCSTLKVAADLQLSTPQKASQHQVLFLLSDVAHAKNPTHSNKKLPTSASVGCDIQNSVGSNIKSDGTLINQVEVGEDGEDLLVKDDCVNTVTGISSGTDGFRSENDTNWDPQKEFIQFLMTNEETVDKAPPHSKIGLEKKRKRKMDVSKITRYTEDCFSDSNCVPNKSKMQEVDFLEQNEELQAVDSQKYALSKVKPESTDEDLESVDAFQHLIYNPDKCGEESSPVHTSTFLSNTLKKKCEESDSESPATFSTEEPSFYPCTKCNVNFREKKHLHRHMMYHLDGNSHFRHLNVPRPYACRECGRTFRDRNSLLKHMIIHQERRQKLMEEIRELKELQDEGRSARLQCPQCVFGTNCPKTFVQHAKTHEKDKRYYCCEECNFMAVTENELECHRGIAHGAVVKCPMVTSDIAQRKTQKKTFMKDSVVGSSKKSATYICKMCPFTTSAKSVLKKHTEYLHSSSCVDSFGSPLGLDKRKNDILEEPVDSDSTKTLTKQQSTTFPKNSALKQDVKRTFGSTSQSSSFSKIHKRPHRIQKARKSIAQSGVNMCNQNSSPHKNVTIKSSVDQKPKYFHQAAKEKSNAKANSHYLYRHKYENYRMIKKSGESYPVHFKKEEASSLNSLHLFSSSSNSHNNFISDPHKPDAKRPESFKDHRRVAVKRVIKESKKESSVGGEDLDSYPDFLHKMTVVVLQKLNSAEKKDSYETEDESSWDNVELGDYTTQAIEDETYSDINQEHVNLFPLFKSKVEGQEPGENATLSYDQNDGFYFEYYEDTGSNNFLHEIHDPQHLETADASLSKHSSVFHWTDLSLEKKSCPYCPATFETGVGLSNHVRGHLHRAGLSYEARHVVSPEQIATSDKMQHFKRTGTGTPVKRVRKAIEKSETTSEHTCQLCGGWFDTKIGLSNHVRGHLKRLGKTKWDAHKSPICVLNEMMQNEEKYEKILKALNSRRIIPRPFVAQKLASSDDFISQNVIPLEAYRNGLKTEALSVSASEEEGLNFLNEYDETKPELPSGKKNQSLTLIELLKNKRMGEERNSAISPQKIHNQTARKRFVQKCVLPLNEDSPLMYQPQKMDLTMHSALDCKQKKSRSRSGSKKKMLTLPHGADEVYILRCRFCGLVFRGPLSVQEDWIKHLQRHIVNANLPRTGAGMVEVTSLLKKPASITETSFSLLMAEAAS

SEQ ID NO: 16316 - protein, 425 aa, Homo Sapiens
MNKMPAGEQECEYNKEGKYYSKGVKLVRKKKKIPGYRWGDIKINIIGEKDDLPIHFCDKCDLPIKIYGRIIPCKHAFCYHCANLYDKVGYKVCPRCRYPVLRIEAHKRGSVFMCSIVQQCKRTYLSQKSLQAHIKRRHKRARKQVTSASLEKVRPHIAPPQTEISDIPKRLQDRDHLSYIPPEQHTMVSLPSVQHMLQEQHNQPHKDIQAPPPELSLSLPFPIQWETVSIFTRKHGNLTVDHIQNNSDSGAKKPTPPDYYPECQSQPAVSSPHHIIPQKQHYAPPPSPSSPVNHQMPYPPQDVVTPNSVRSQVPALTTTYDPSSGYIIVKVPPDMNSPPLRAPQSQNGNPSASEFASHHYNLNILPQFTENQETLSPQFTQTDAMDHRRWPAWKRLSPCPPTRSPPPSTLHGRSHHSHQRRHRRY

SEQ ID NO: 16317 - protein, 1829 aa, Homo Sapiens
MEDTPPSLSCSDCQRHFPSLPELSRHRELLHPSPNQDSEEADSIPRPYRCQQCGRGYRHPGSLVNHRRTHETGLFPCTTCGKDFSNPMALKSHMRTHAPEGRRRHRPPRPKEATPHLQGETVSTDSWGQRLGSSEGWENQTKHTEETPDCESVPDPRAASGTWEDLPTRQREGLASHPGPEDGADGWGPSTNSARAPPLPIPASSLLSNLEQYLAESVVNFTGGQEPTQSPPAEEERRYKCSQCGKTYKHAGSLTNHRQSHTLGIYPCAICFKEFSNLMALKNHSRLHAQYRPYHCPHCPRVFRLPRELLEHQQSHEGERQEPRWEEKGMPTTNGHTDESSQDQLPSAQMLNGSAELSTSGELEDSGLEEYRPFRCGDCGRTYRHAGSLINHRKSHQTGVYPCSLCSKQLFNAAALKNHVRAHHRPRQGVGENGQPSVPPAPLLLAETTHKEEEDPTTTLDHRPYKCSECGRAYRHRGSLVNHRHSHRTGEYQCSLCPRKYPNLMALRNHVRVHCKAARRSADIGAEGAPSHLKVELPPDPVEAEAAPHTDQDHVCKHEEEATDITPAADKTAAHICSICGLLFEDAESLERHGLTHGAGEKENSRTETTMSPPRAFACRDCGKSYRHSGSLINHRQTHQTGDFSCGACAKHFHTMAAMKNHLRRHSRRRSRRHRKRAGGASGGREAKLLAAESWTRELEDNEGLESPQDPSGESPHGAEGNLESDGDCLQAESEGDKCGLERDETHFQGDKESGGTGEGLERKDASLLDNLDIPGEEGGGTHFCDSLTGVDEDQKPATGQPNSSSHSANAVTGWQAGAAHTCSDCGHSFPHATGLLSHRPCHPPGIYQCSLCPKEFDSLPALRSHFQNHRPGEATSAQPFLCCLCGMIFPGRAGYRLHRRQAHSSSGMTEGSEEEGEEEGVAEAAPARSPPLQLSEAELLNQLQREVEALDSAGYGHICGCCGQTYDDLGSLERHHQSQSSGTTADKAPSPLGVAGDAMEMVVDSVLEDIVNSVSGEGGDAKSQEGAGTPLGDSLCIQGGESLLEAQPRPFRCNQCGKTYRHGGSLVNHRKIHQTGDFLCPVCSRCYPNLAAYRNHLRNHPRCKGSEPQVGPIPEAAGSSELQVGPIPEGGSNKPQHMAEEGPGQAEVEKLQEELKVEPLEEVARVKEEVWEETTVKGEEIEPRLETAEKGCQTEASSERPFSCEVCGRSYKHAGSLINHRQSHQTGHFGCQACSKGFSNLMSLKNHRRIHADPRRFRCSECGKAFRLRKQLASHQRVHMERRGGGGTRKATREDRPFRCGQCGRTYRHAGSLLNHRRSHETGQYSCPTCPKTYSNRMALKDHQRLHSENRRRRAGRSRRTAVRCALCGRSFPGRGSLERHLREHEETEREPANGQGGLDGTAASEANLTGSQGLETQLGGAEPVPHLEDGVPRPGERSQSPIRAASSEAPEPLSWGAGKAGGWPVGGGLGNHSGGWVPQFLTRSEEPEDSVHRSPCHAGDCQLNGPTLSHMDSWDNRDNSSQLQPGSHSSCSQCGKTYCQSGSLLNHNTNKTDRHYCLLCSKEFLNPVATKSHSHNHIDAQTFACPDCGKAFESHQELASHLQAHARGHSQVPAQMEEARDPKAGTGEDQVVLPGQGKAQEAPSETPRGPGESVERARGGQAVTSMAAEDKERPFRCTQCGRSYRHAGSLLNHQKAHTTGLYPCSLCPKLLPNLLSLKNHSRTHTDPKRHCCSICGKAFRTAARLEGHGRVHAPREGPFTCPHCPRHFRRRISFVQHQQQHQEEWTVAGSGRGHEGSQEEVGTQWRGKSSPKVGGGARSERREPRGF

SEQ ID NO: 16318 - protein, 568 aa, Homo Sapiens
MAQVDSQDRWGEASPLSSLTEEAHDTQMLSMNLESDDEDGGEAEKEGTADPVACPRGSSPVTHENPDLPWPHPLGKEEEKFSDSSSAGGMGQKPVEMSGKASWSRDVTKINETQGSPGASRALGSLPSGLAHKLLGQMQPLGDRLPAGDDGYSGANQDAVLDVPPSFPSNGKYLCAHKSVDTSAGNSSLLCFPRPGSNWDLPTQETHTPAQASATPASLAAAVLAKARNSRKVQNQAGRREGGEAEARPYRCLRGGRAFQKPSKPLSPAETRGGAAKRYACELCGKAYSHRGTLQQHRRLHTGERPYQCSFCDKAYTWSSDHRKHIRTHTGEKPYPCPDCGKAFVRSSDLRKHQRNMHSNNKPFPCSECGLTFNKPLSLLRHQRTHLGAKPFRCPACDREFAVASRMVEHQRVHSGERPFPCPTCGKCFTKSSNLSEHQTLHTGQRPFKCADCGVAFAQPSRLVRHQRIHTGERPFPCTQCGQAFARSSTLKRHQQIHSGEKGFLCAECGRAFRIASELAQHIRMHNGERPYQCEDCGQAFTRSNHLQRHRAKHGTCKKEPIPSSSDE

SEQ ID NO: 16319 - protein, 505 aa, Homo Sapiens
MTKAQESLTLEDVAVDFTWEEWQFLSPAQKDLYRDVMLENYSNLVSVGYQAGKPDALTKLEQGEPLWTLEDEIHSPAHPEIEKADDHLQQPLQNQKILKRTGQRYEHGRTLKSYLGLTNQSRRYNRKEPAEFNGDGAFLHDNHEQMPTEIEFPESRKPISTKSQFLKHQQTHNIEKAHECTDCGKAFLKKSQLTEHKRIHTGKKPHVCSLCGKAFYKKYRLTEHERAHRGEKPHGCSLCGKAFYKRYRLTEHERAHKGEKPYGCSECGKAFPRKSELTEHQRIHTGIKPHQCSECGRAFSRKSLLVVHQRTHTGEKPHTCSECGKGFIQKGNLNIHQRTHTGEKPYGCIDCGKAFSQKSCLVAHQRYHTGKTPFVCPECGQPCSQKSGLIRHQKIHSGEKPYKCSDCGKAFLTKTMLIVHHRTHTGERPYGCDECEKAYFYMSCLVKHKRIHSREKRGDSVKVENPSTASHSLSPSEHVQGKSPVNMVTVAMVAGQCEFAHILHS

SEQ ID NO: 16320 - protein, 606 aa, Homo Sapiens
MSHTASSCQELVENCAVHVAGMAQEDSRRGQVPSSFYHGANQELDLSTKVYKRESGSPYSVLVDTKMSKPHLHETEEQPYFRETRAVSDVHAVKEDRENSDDTEEEEEEVSYKREQIIVEVNLNNQTLNVSKGEKGVSSQSKETPVLKTSSEEEEEESEEEATDDSNDYGENEKQKKKEKIVEKVSVTQRRTRRAASVAAATTSPTPRTTRGRRKSVEPPKRKKRATKEPKAPVQKAKCEEKETLTCEKCPRVFNTRWYLEKHMNVTHRRMQICDKCGKKFVLESELSLHQQTDCEKNIQCVSCNKSFKKLWSLHEHIKIVHGYAEKKFSCEICEKKFYTMAHVRKHMVAHTKDMPFTCETCGKSFKRSMSLKVHSLQHSGEKPFRCENCDERFQYKYQLRSHMSIHIGHKQFMCQWCGKDFNMKQYFDEHMKTHTGEKPFICEICGKSFTSRPNMKRHRRTHTGEKPYPCDVCGQRFRFSNMLKAHKEKCFRVTSPVNVPPAVQIPLTTSPATPVPSVVNTATTPTPPINMNPVSTLPPRPIPHPFSHLHIHPHPHHPHHLPIPPVPHLPPPPALFKSEPLNHRGQSEDNFLRHLAEKNSSAQHH

SEQ ID NO: 16321 - protein, 615 aa, Homo Sapiens
MAERALEPEAEAEAEAGAGGEAAAEEGAAGRKARGRPRLTESDRARRRLESRKKYDVRRVYLGEAHGPWVDLRRRSGWSDAKLAAYLISLERGQRSGRHGKPWEQVPKKPKRKKRRRRNVNCLKNVVIWYEDHKHRCPYEPHLAELDPTFGLYTTAVWQCEAGHRYFQDLHSPLKPLSDSDPDSDKVGNGLVAGSSDSSSSGSASDSEESPEGQPVKAAAAAAAATPTSPVGSSGLITQEGVHIPFDVHHVESLAEQGTPLCSNPAGNGPEALETVVCVPVPVQVGAGPSALFENVPQEALGEVVASCPMPGMVPGSQVIIIAGPGYDALTAEGIHLNMAAGSGVPGSGLGEEVPCAMMEGVAAYTQTEPEGSQPSTMDATAVAGIETKKEKEDLCLLKKEEKEEPVAPELATTVPESAEPEAEADGEELDGSDMSAIIYEIPKEPEKRRRSKRSRVMDADGLLEMFHCPYEGCSQVYVALSSFQNHVNLVHRKGKTKVCPHPGCGKKFYLSNHLRRHMIIHSGVREFTCETCGKSFKRKNHLEVHRRTHTGETPLQCEICGYQCRQRASLNWHMKKHTAEVQYNFTCDRCGKRFEKLDSVKFHTLKSHPDHKPT

SEQ ID NO: 16322 - protein, 581 aa, Homo Sapiens
MLCNKEFLGGHIVRHAQAHQKKGSFACVICGRKFRNRGLMQKHLKNHVKKIQRQQIAAAQQDDQEVTALEEINCSSSSISFENGNSDSKDLEVETLTASSEGNKEVIPEHVAEFIEIPISVPEDVIENVIENGSPNNSLNNVFKPLTECGDDYEEEEDEEGDYEEDDYDLNQETSVIHKINGTVCHPKDIYATDQEGNFKCPALGCVRIFKRIGFLNKHAMTVHPTDLNVRQTVMKWSKGKCKFCQRQFEDSQHFIDHLNRHSYPNVYFCLHFNCNESFKLPFQLAQHTKSHRIFQAQCSFPECHELFEDLPLLYEHEAQHYLSKTPESSAQPSETILWDVQTDSNPNQEKDSSSNEKQTISLPVSTSKSRKESTEPKTCIESMEKKTDSLVQNGNERSDDTVSNISLIDQKMPDIEPNSENNCSSSDIVNGHSEIEQTPLVSSDPALKIDTNRIRTENGSILPSVVPQEHNTLPVSQAPSKPNLTSEHTSYGLILTKPYVRPLPPSYLDERYLSMPKRRKFLTDRVDACSDQDNVYKKSVKRLRCGKCLTTYCNAEALEAHLAQKKCQTLFGFDSDDESA

SEQ ID NO: 16323 - protein, 491 aa, Homo Sapiens
MEEIPAQEAAGSPRVQFQSLETQSECLSPEPQFVQDTDMEQGLTGDGETREENKLLIPKQKISEEVHSYKVRVGRLKHDITQVPETREVYKSEDRLERLQEILRKFLYLEREFRQITISKETFTSEKNNECHEPEKSFSLDSTIDADQRVLRIQNTDDNDKYDMSFNQNSASGKHEHLNLTEDFQSSECKESLMDLSHLNKWESIPNTEKSYKCDVCGKIFHQSSALTRHQRIHTREKPYKCKECEKSFSQSSSLSRHKRIHTREKPYKCEASDKSCEASDKSCSPSSGIIQHKKIHTRAKSYKCSSCERVFSRSVHLTQHQKIHKEMPCKCTVCGSDFCHTSYLLEHQRVHHEEKAYEYDEYGLAYIKQQGIHFREKPYTCSECGKDFRLNSHLIQHQRIHTGEKAHECNECGKAFSQTSCLIQHHKMHRKEKSYECNEYEGSFSHSSDLILQQEVLTRQKAFDCDVWEKNSSQRAHLVQHQSIHTKENS

SEQ ID NO: 16324 - protein, 1059 aa, Homo Sapiens
MNMSQASVSFQDVTVEFTREEWQHLGPVERTLYRDVMLENYSHLISVGYCITKPKVISKLEKGEEPWSLEDEFLNQRYPGYFKVDHIKGIREKQEKPLWQEIFISDADKTLSKEGQKVLEKPFNLEIAPELSEKISCKCDSHRMNLPVASQLIISERKYSRKKTEYMNVCEKLQLDIKHEKAHAEEKSYEHGENAKAFSYKKDQHWKFQTLEESFECDGSGQGLYDKTICITPQSFLTGEKSCKDDEFRKNFDKITLFNHMRTDTRGKCSDLNEYGTSCDKTTAVEYNKVHMAMTHYECNERGINFSRKSPLTQSQRTITGWSAFESNKCEENFSQSSAHIVHQKTQAGDKFGEHNECTDALYQKLDFTAHQRIHTEDKFYLSDEHGKCRKSFYRKAHLIQHQRPHSGEKTYQYEECAKSFCSSSHPIQHPGTYVGFKLYECNECGKAFCQNSNLSKHLRIHTKEKPCDNNGCGRSYKSPLIGHQKTDAEMELCGGSEYGKTSHLKGHQRILMGEKPYECIECGKTFSKTSHLRAHQRIHTGEKPYECVECEKTFSHKTHLSVHQRVHTGEKPYECNDCGKSFTYNSALRAHQRIHTGEKPYECSDCEKTFAHNSALRAHHRIHTGEKPYECNECGRSFAHISVLKAHQRIHTGEKPYECNECGRSFTYNSALRAHQRIHTGRKPYECSDCEKTFAHNSALKIHQRIHTGEKPYECNECEKTFAHNSALRAHQNIHTGEKLYECSECGKTFFQKTRLSTHRRIHTGEKPYECSKCGKTFSQKSYLSGHERIHTGEKPYECNVCGKTFVYKAALIVHQRIHTGEKPYECNQCGKTFSQRTHLCAHQRIHTGEKPYECNECGKTFADNSALRAHHRIHTGEKPYECNDCGKTFSKTSHLRAHLRTRSGEKPYECSECGKTFSEKSYVSAHQRVHTGEKPYECNVCGKPFAHNSTLRVHQRIHTGEKSYECNDCGKTFSQKSHLSAHQRIHTGEKPYECNECGKAFAQNSTLRVHQRIHTGEKPYECDECGKTFVRKAALRVHHTRMHTREKTLACNGFGKS

SEQ ID NO: 16325 - protein, 819 aa, Homo Sapiens
MMNLEKNFDKTTLFNHMRTDKRGKCSDLNEYGTSCDKTTAVEYNKVHMAMTHYECNERGINFSRKSPLTQSQRTITGWSAFESNKCEENFSQSSAHIVHQKTQAGDKFGEHNECTDALYQKLDFTAHQRIHTDFTAHQKFYLSDEHGKCRKSFYWKAHLIQHERPHSGEKTYQYEECAKSFCSSSHPIQHPGTYVGFKLYECNECGKAFCQNSNLSKHLRIHTKEKPCDNNGCGRSYKSPLIGHQKTDAEMELCGGSEYGKTSHLKGHQRILMGEKPYECIECGKTFSKTSHLRAHQRIHTGEKPYECVECEKTFSHKTHLSVHQRVHTGEKPYECNDCGKSFTYNSALRAHQRIHTGEKPYECSDCEKTFAHNSALRAHHRIHTGEKPYECNECGRSFAHISVLKAHQRIHTREKPYECNECGRSFTYNSALRAHQRIHTGRKPYECSDCEKTFAHNSALKIHQRIHTGEKPYKCNECEKTFAHNSALRAHQNIHTGEKLYECSECGKTFFQKTRLSTHRRIHTGEKPYECSKCGKTFSQKSYLSGHERIHTGEKPYECNVCGKTFVYKAALIVHQRIHTGEKPYECNECGKTFSQRTHLCAHQRIHTGEKPYECNECGKTFADNSALRAHHRIHTGEKPYECNDCGKTFSKTSHLRAHLRTRSGEKPYECSECGKTFSEKSYVSAHQRVHTGEKPYECNVCGKPFAHNSTLRVHQRIHTGEKSYECNDCGKTFSQKSHLSAHQRIHTGEKPYECNECGKAFAQNSTLRVHQRIHTGEKPYECDECGKTFVRKAALRVHHTRMHTREKTLACNGFGKS

SEQ ID NO: 16326 - protein, 573 aa, Homo Sapiens
MGPLQFRDVAIEFSLEEWHCLDMAQRNLYRDVMLENYRNLVFLGIVVSKPDLITHLEQGKKPSTMQRHEMVANPSVLCSHFNQDLWPEQSIKDSFQKLILRRHKKCGHDNLQLKKGCESVDKCKVHKRGYNGLNQCLTTTQSKMFQCDKHGKVFHQFSNTNRHKIRHTGKNPCKFTECGKAFNRSSTFTTHKKIHTGEKPYKCIECGKAFNRSSHLTTHKIIHTGEKRYKCEDCGKAFNRSSNLTTHKKIHTGEKPYKCEECGKAFKRSSILTTHKRIHTGEKPYKCEECGKVFKYLSSLSTHKIIHTGEKPYKCEECGKAFNWSSHLTTHKRIHTGEKPYKCEECGKGFKYSSTLTKHKIIHTGEKPYKCEECGEAFKYSCSLTAHKIIHTGKKPYKCEECGKVFKHSSPLSKHKRIHTGEKPYKCEECGKAFSRSSILTTHKIIHTGEKPYECEDCGKAFNRSSNLTKHKKIHTGEKPYKCEECGKAFKCSSILTTHKRIHTADKPYKCEECGKDFKYSSTLTRHKKIHTGGKPHKCNKCGKAFISSSNLSRHEIIHMGGNPYKCENVAKP

SEQ ID NO: 16327 - protein, 331 aa, Homo Sapiens
MRRKTRNFKHKTVKDNKVLTEGSDQESEKDNSQCCDPATNERVQAEKRQYVCTECGKAFSQSANLTVHERIHTGEKPYKCKECGKAFSHSSNLVVHRRIHTGLKPYTCSECGKSFSGKSHLIRHQGIHSGEKTYECKECGKAFSRSSGLISHHRVHTGEKPYSCIECGKAFSRSSNLTQHQRMHRGKKVYKCKECGKTCGSNTKIMDHQRIHTGEKPYECDECGKTFILRKTLNEHQRLHRREKPYKCNECGKAFTSNRNLVDHQRVHTGEKPYKCNECGKTFRQTSQVILHLRTHTKEKPYKCSECGKAYRYSSQLIQHQRKHNEEKETS

SEQ ID NO: 16328 - protein, 426 aa, Homo Sapiens
MLENYGAVASLAAFPFPKPALISQLERGETPWCSVPRGALDGEAPRGISSGYPFLKPAGISHPEQVEEPLNLKLQGEGPSLICPEGVLKRKKEDFILKEEIIEEAQDLMVLSSGPQWCGSQELWFGKTCEEKSRLGRWPGYLNGGRMESSTNDIIEVIVKDEMISVEESSGNTDVNNLLGIHHKILNEQIFYICEECGKCFDQNEDFDQHQKTHNGEKVYGCKECGKAFSFRSHCIAHQRIHSGVKPYECQECAKAFVWKSNLIRHQRIHTGEKPFECKECGKGFSQNTSLTQHQRIHTGEKPYTCKECGKSFTRNPALLRHQRMHTGEKPYECKDCGKGFMWNSDLSQHQRVHTGDKPHECTDCGKSFFCKAHLIRHQRIHTGERPYKCNDCGKAFSQNSVLIKHQRRHARDKPYNCQISHLLEH

SEQ ID NO: 16329 - protein, 261 aa, Homo Sapiens
MIYKCPMCREFFSERADLFMHQKIHTAEKPHKCDKCDKGFFHISELHIHWRDHTGEKVYKCDDCGKDFSTTTKLNRHKKIHTVEKPYKCYECGKAFNWSSHLQIHMRVHTGEKPYVCSECGRGFSNSSNLCMHQRVHTGEKPFKCEECGKAFRHTSSLCMHQRVHTGEKPYKCYECGKAFSQSSSLCIHQRVHTGEKPYRCCGCGKAFSQSSSLCIHQRVHTGEKPFKCDECGKAFSQSTSLCIHQRVHTKERNHLKISVI

SEQ ID NO: 16330 - protein, 613 aa, Homo Sapiens
MGEAFYTVKLERLESCDTVGLSFQEVQKNTYDFECQWKDDEGNYKTVLMLQKENLPGRRAQRDRRAAGNRHIENQLGVSFQSHLPELQQFQHEGKIYEYNQVEKSPNNRGKHYKCDECGKVFSQNSRLTSHKRIHTGEKPYQCNKCGKAFTVRSNLTIHQVIHTGEKPYKCNECGKVFSQPSNLAGHQRIHTGEKPYKCNECGKAFRAHSKLTTHQVIHTGEKPYKCKECGKCFTQNSHLASHRRIHTGEKPYKCNECGKAFSVRSSLTTHQTIHTGEKPYKCNECGKVFRHNSYLAKHRRIHTGEKPYKCNECGKAFSMHSNLTKHQIIHTGEKPFKCNECVKVFTQYSHLANHRRIHTGEKPYRCDECGKAFSVRSSLTTHQAIHTGEKPYKCNDCGKVFTQNSHLASHRGIHSGEKPYKCDECGKAFSQTSQLARHWRVHTGEKPYKCNECGKAFSVHSSLTIHQTIHTGQKPYKCNDCGKVFRHNSYLAIHQRIHTGEKPYKCNECGKAFSVHSNLATHQVIHTGEKPYKCNECGKVFTQNSHLANHRRIHTGEKPYRCNECGKAFSVRSTLTTHMAVHTGDKPYKCNQCGKVFTQNSNLAKHRRIHSG

SEQ ID NO: 16331 - protein, 610 aa, Homo Sapiens
MPSARGKSKSKAPITFGDLAIYFSQEEWEWLSPIQKDLYEDVMLENYRNLVSLGLSFRRPNVITLLEKGKAPWMVEPVRRRRAPDSGSKCETKKLPPNQCNKSGQSICQKLVSAQQKAPTRKSGCNKNSVLVKPKKGHSGKKPLKCNDCGKTFSRSFSLKLHQNIHTGEKPFECSNCRKAFRQISSILLHQRIHSGKKSHECNKCGESFNQRTTLILHMRIHDGKEILDCGKALSQCQSFNIHQKIHVVGNVCQCRKCGKAFNQMSSLLLHKKIHNGKKTHKYNKCGRGFKKKSVFVVHKRIHAGEKIPENAKALSQSLQQRSHHLENPFKCRKCGKLFNRISPLMLHQRIHTSEKPYKCDKCDKFFRRLSTLILHLRIHNGEKLYRCNKCEKVCNRHSSLIQHQKVHTKKKKLFECKECGKMFSGTANLKIHQNIHSEEKPFKCNKCSKVFGRQSFLIEHQRIHTGEKPYQCEECGKAFSHRISLTRHKRIHTEDRPYECDQCGKAFSQSAHLAQHERIHTGEKPYTCKTCGKAFSQRTSLILHERSHTGEKPYECNECGKAFSSGSDLIRHQRSHSSEKPYECSKCGKAYSRSSSLIRHQNTHSEEKA

SEQ ID NO: 16332 - protein, 619 aa, Homo Sapiens [sequence omitted]

SEQ ID NO: 16333 - protein, 464 aa, Homo Sapiens
MVSGLRLASRSGEEGWLKPAVARLGPPRHRLRNLRTESPWRSRGSVLFCSGPGRAGRAAEPLHPVCTCGRHFRRPEPCREPLASPIQDSVAFEDVAVNFTQEEWALLDSSQKNLYREVMQETCRNLASVGSQWKDQNIEDHFEKPGKDIRNHIVQRLCESKEDGQYGEVVSQIPNLDLNENISTGLKPCECSICGKVFVRHSLLNRHILAHSGYKPYGEKQYKCEQCGKFFVSVPGVRRHMIMHSGNPAYKCTICGKAFYFLNSVERHQRTHTGEKPYKCKQCGKAFTVSGSCLIHERTHTGEKPYECKECGKTFRFSCSFKTHERTHTGERPYKCTKCDKAFSCSTSLRYHGSIHTGERPYECKQCGKAFSRLSSLCNHRSTHTGEKPYECKQCDQAFSRLSSLHLHERIHTGEKPYECKKCGKAYTRSSHLTRHERSHDIEAGCSDSAYNPSTLGGQGVWIA

SEQ ID NO: 16334 - protein, 389 aa, Homo Sapiens
MDSVSFEDVAVAFTQEEWALLDPSQKNLYRDVMQEIFRNLASVGNKSEDQNIQDDFKNPGRNLSSHVVERLFEIKEGSQYGETFSQDSNLNLNKKVSTGVKPCECSVCGKVFICHSALHRHILSHIGNKLFECEECPEKLYHCKQCGKAFISLTSVDRHMVTHTSNGPYKGPVYEKPFDFPSVFQMPQSTYTGEKTYKCKHCDKAFNYSSYLREHERTHTGEKPYACKKCGKSFTFSSSLRQHERSHTGEKPYECKECGKAFSRSTYLGIHERTHTGEKPYECIKCGKAFRCSRVLRVHERTHSGEKPYECKQCGKAFKYSSNLCEHERTHTGVKPYGCKECGKSFTSSSALRSHERTHTGEKPYECKKCGKAFSCSSSLRKHERAYMW

SEQ ID NO: 16335 - protein, 534 aa, Homo Sapiens
MLSPVSRDASDALQGRKCLRPRSRRLPLPAAVRAHGPMAELTDSARGCVVFEDVFVYFSREEWELLDDAQRLLYHDVMLENFALLASLGIAFSRSRAVMKLERGEEPWVYDQVDMTSATEREAQRGLRPGCWHGVEDEEVSSEQSIFVAGVSEVRTLMAELESHPCDICGPILKDTLHLAKYHGGKARQKPYLCGACGKQFWFSTDFDQHQNQPNGGKLFPRKEGRDSVKSCRVHVPEKTLTCGKGRRDFSATSGLLQHQASLSSMKPHKSTKLVSGFLMGQRYHRCGECGKAFTRKDTLARHQRIHTGERPYECNECGKFFSQSYDLFKHQTVHTGERPYECSECGKFFRQISGLIEHRRVHTGERLYQCGKCGKFFSSKSNLIRHQEVHTGARPYVCSECGKEFSRKHTLVLHQRTHTGERPYECSECGKAFSQSSHLNVHWRIHSSDYECSRCGKAFSCISKLIQHQKVHSGEKPYECSKCGKAFTQRPNLIRHWKVHTGERPYVCSECGREFIRKQTLVLHQRVHAGEKL

SEQ ID NO: 16336 - protein, 452 aa, Homo Sapiens
MFATSGAVAAGKPYSCSECGKSFCYSSVLLRHERAHGGDGRFRCLECGERCARAADLRAHRRTHAGQTLYICSECGQSFRHSGRLDLHLGAHRQRCRTCPCRTCGRRFPHLPALLLHRRRQHLPERPRRCPLCARTFRQSALLFHQARAHPLGTTSDPAAPPHRCAQCPRAFRSGAGLRSHARIHVSRSPTRPRVSDAHQCGVCGKCFGKSSTLTRHLQTHSGEKPFKCPECGKGFLESATLVRHQRTHTGEKPYACGDCGRCFSESSTLLRHRRSHQGERPHACATCGKGFGQRSDLVVHQRIHTGEKPFACPECGRRFSDRSDLTKHRRTHTGEKPYRCELCGKRFTCVSNLNVHRRNHAGHKPHKCPECSKAFSVASKLALHRKTHLGERPAECAECGKCFSHSRSLSQHQRAHTRARTAAAVAIQSAVGTALVFEGPAEQEKPGFSVS

SEQ ID NO: 16337 - protein, 581 aa, Homo Sapiens
MAMSQESLTFKDVFVDFTLEEWQQLDSAQKNLYRDVMLENYSHLVSVGHLVGKPDVIFRLGPGDESWMADGGTPVRTCAGEDRPEVWEVDEQIDHYKESQDKFLWQAAFIGKETLKDESGQECKICRKIIYLNTDFVSVKQRLPKYYSWERCSKHHLNFLGQNRSYVRKKDDGCKAYWKVCLHYNLHKAQPAERFFDPNQRGKALHQKQALRKSQRSQTGEKLYKCTECGKVFIQKANLVVHQRTHTGEKPYECCECAKAFSQKSTLIAHQRTHTGEKPYECSECGKTFIQKSTLIKHQRTHTGEKPFVCDKCPKAFKSSYHLIRHEKTHIRQAFYKGIKCTTSSLIYQRIHTSEKPQCSEHGKASDEKPSPTKHWRTHTKENIYECSKCGKSFRGKSHLSVHQRIHTGEKPYECSICGKTFSGKSHLSVHHRTHTGEKPYECRRCGKAFGEKSTLIVHQRMHTGEKPYKCNECGKAFSEKSPLIKHQRIHTGERPYECTDCKKAFSRKSTLIKHQRIHTGEKPYKCSECGKAFSVKSTLIVHHRTHTGEKPYECRDCGKAFSGKSTLIKHQRSHTGDKNL

SEQ ID NO: 16338 - protein, 568 aa, Homo Sapiens
MGLLTFRDVAIEFSLEEWQCLDTAQRNLYKNVILENYRNLVFLGIAVSKQDLITCLEQEKEPLTVKRHEMVNEPPVMCSHFAQEFWPEQNIKDSFEKVTLRRYEKCGNDNFQLKGCKSVDECKLHKGGYNGLNQCLPTMQSKMFQCDKYVKVFNKFSHSDRHKIKHMENKPFKCKECGRSFCMLSHLTRHERNYTKVNFCKCEECEKAVNQSSKLTKHKRIYTCEKLYKCQECDRTFNQFSNLTEYKKDYAREKPYKCEECGKAFNQSSHLTTHKIIHTGEKPYKCEECGKAFNQFSNLTTHKKIHTGEQPYICEECGKAFTQSSTLTTHKRIHTGEKPYKCEECGKAFNRSSKLTEHKNIHTGEQPYKCEECGKAFNRSSNLTEHRKIHTEEKPYKCKECGKAFKHSSALTTHKRIHTGEKPYKCEECGKAFNRSSKLTEHKKLHTGKKPYKCEECGKAFIQSSKLTEHKKIHSGEIPYKCEECGKAFKHSSSLTTHKRIHTGEKPYKCEECGKAFSRSSKLTEHKIIHTGEKPYKCERCDKAFNQSANLTKHKKIHTGEKLQNWNV

SEQ ID NO: 16339 - protein, 588 aa, Homo Sapiens
MLENYRNLVFLGIAAFKPDLIIFLEQGKEPWNMKRHEMVEEPPVICSHFSQEFWPEQGIEDSFQKMILRRYDKCGHENLHLKISCTNVDECNVHKEGYNKLNQSLTTTQSKVFQCGKYANVFHKCSNSNRHKIRHTGEKGLKCKEYVRSFCMLSHLSQHERIYTRENSYKCEENGKAFNWSSTLTYYKSIHTGEKPYKCEECGKAFSKFSILTKHKVIHTGEKPYKCEECGKAFNRSSILTKHKIIHTGEKPYKCEECGKGFSSVSTLNTHKAIHAEEKPYKCEECGKASNSSSKLMEHKRIHTGEKPYKCEECGKAFSWSSSLTEHKRIHAGEKPYKCEECGKAFNRSSILTKHKIIHTGEKPYKCEGCGKAFSKVSTLNTHKAIHAEEKPYKCEECGKASNSSSKLMEHKRIHTGEKPYKCEECGKAFSWSSSLTEHKRIHAGEKPYKCEECGKAFTWSSSFTKHKRIHAAEKPYKCEECGKGFSTFSILTKHKIIHTGEKRYKCEECGKAFSWSSILTEHKIIHTGEKPYKCEECGKAFSRSSSLTRHKRIHTGEKPYKCEECGKAFKSSSTVSYHKKIHTGENP

SEQ ID NO: 16340 - protein, 584 aa, Homo Sapiens
MALSQGLFTFKDVAIEFSQEEWECLDPAQRALYRDVMLENYRNLLSLDEDNIPPEDDISVGFTSKGLSPKENNKEELYHLVILERKESHGINNFDLKEVWENMPKFDSLWDYDVKNYKGMPLTCNKNLTHRKDQQHNKSSIHFSLKQSVSIRDSAHQYFIHDKPFIRNLLKLKNNIRYAGNKYVKCFENKIGLSLQAQLAELQRFQTGEKMYECNPVEKSINSSSVSPLPPCVKNICNKYRKILKYPLLHTQYGRTHIREKSYKCNDCGKAFSKSSNLTNHQRIHSGQRPYKCNECGKAFNQCSNLTRHQRVHTGEKPYQCNICGKVCSQNSNLASHQRMHTGEKPYKCNECGKAFIQRSHLWGHERIHTGEKPYKCNECDKAFAERSSLTQHKRIHTGEKPYICNECGKAFKQCSHLTRHQNIHPGEKPHKCNVCGRAFIQSSSLVEHQRIHTGEKPYKCNKCDKAFIKRSHLWGHQRTHTGEKPYKCTECGKAFTERSNLTQHKKIHTGEKPYKCTECGKAFTQFANLTRHQKIHIEKKHCKHNIHGNALFQSSNLGDHQKSYNREKHIKYNETKIKYSSCT

SEQ ID NO: 16341 - protein, 525 aa, Homo Sapiens
MGTISLCIGVCAFEGANTSTSFYKLVYTAILSYSIQDLLPEQDMKDLCQKVTLTRHRSWGLDNLHLVKDWRTVNEGKGQKEYCNRLTQCSSTKSKIFQCIECGRNFSWRSILTEHKRIHTGEKPYKCEECGKVFNRCSNLTKHKRIHTGEKPYKCDECGKVFNWWSQLTNHKKIHTGEKPYKCDECDKVFNWWSQLTSHKKIHSGEKPYPCEECGKAFTQFSNLTQHKRIHTGEKPYKCKECCKAFNKFSNLTQHKRIHTGEKPYKCEECGNVFNECSHLTRHRRIHTGEKPYKCEECGKAFTQFASLTRHKRIHTGEKPYQCEECGKTFNRCSHLSSHKRIHTGEKPYKCEECGRTFTQFSNLTQHKRIHTGEKPYKCKECGKAFNKFSSLTQHRRIHTGVKPYKCEECGKVFKQCSHLTSHKRIHTGEKPYKCKECGKAFYQSSILSKHKRIHTEEKPYKCEECGKAFNQFSSLTRHKRIHTGEKRYKCKECGKGFYQSSIHSKYKRIYTGEEPDKCKKCGSL

SEQ ID NO: 16342 - protein, 411 aa, Homo Sapiens
MAKRPGSPGSREMGLLTFRDVVIEFSLEEWQCLDHAQQNLYRDVMLENYRNLVSLGIAVSKPDLITCLEQNKEPWNIKRNEMVTKHPVMCSHFTQDLPPELGIKDSLQKVIPRRYGKSGHDNLQVKTCKSMGECEVQKGGCNEVNQCLSTTQNKIFQTHKCVKVFGKFSNSNRHKTRHTGKKHFKCKKYGKSFCMVSQLHQHQIIHTRENSYQCEECGKPFNCSSTLSKHKRIHTGEKPYRCEECGKAFTWSSTLTKHRRIHTGEKPYTCEECGQAFSRSSTLANHKRIHTGEKPYTCEECGKAFSLSSSLTYHKRIHTGEKPYTCEECGKAFNCSSTLKKHKIIHTGEKPYKCKECGKAFAFSSTLNTHKRIHTGEEPYKCEECDKAFKWSSSLANHKSMHTGEKPYKCE

SEQ ID NO: 16343 - protein, 530 aa, Homo Sapiens
MPGPPGSLEMGPLTFRDVAIEFSLEEWQCLDTAQRNLYRKVMFENYRNLVFLGIAVSKPHLITCLEQGKEPWNRKRQEMVAKPPVIYSHFTEDLWPEHSIKDSFQKVILRGYGKCGHENLQLRISCKSVDESKVFKEGYNELNQCLRTTQSKIFQCDKYVKVFHKFSNSNSHKKRNTGKKVFKCKECGKSFCMLSHLTQHIRIHTRENSYKCEECGKVLNWFSELIKHKGIHMGEKPYKCEECGKAFNQSSTLIKHKKIHIEEKPFKCEECGKAFSLFSILSKHKIIHTGDKPYKCDECHKAFNWFATLTNHKRIHTGEKPFKCEECGKDFNQFSNLTKHKKIHTGEKPYKCEECGKAFNQFANLTRHKKIHTGEKSYKCEECGKAFIQSSNLTEHMRIHTGEKPYKCEECGKAFNGCSSLTRHKRIHTRENTYKCEECGKGFTLFSTLTNHKVIHTGEKSYKCDECGNVFNWPATLANHKRIHAREKPYKCEECGKAFNRSSHLTRHKKIHTGEKLYKPEKCDNNFDNT

SEQ ID NO: 16344 - protein, 645 aa, Homo Sapiens
MEPLKFRDVAIEFSLEEWQCLDTIQQNLYRNVMLENYRNLVFLGIVVSKPDLITCLEQEKEPWTRKRHRMVAEPPVICSHFAQDFSPEQNIKDSFQKVTPRRYGKCEHENLQLSKSVDECKVQKGGYNGLNQCLPTTQSKIFQCDKYMKIFHKFSNLNGHKVRHTRKKPFKYKEFGKSFCIFSNLTQHKIICTRVNFYKCEDCGKAFNGSSIFTKHKRIHIGEKSYICEECGKACNQFTNLTTHKIIYTRDKLYKREECSKAFNLSSHITTHTIIHTGENPYKREECDKAFNQSLTLTTHKIIHTREKLNEYKECGKAFNQSSHLTRHKIIHTGEKPYKCEECGKAFNQSSHLTRHKIIHTGEKPYRCEECGKAFRQSSHLTTHKIIHTGEKPYKCEECGKAFNKSSHLTRHKSIHTGEKPYQCEKCGKASNQSSNLTEHKNIHTEEKPYKCEECGKAFNQFSNLTTHKRIHTGEKPYKCEECGKAFNQSSILTTHKRIHTGEKSYKCEECGKAFYRSSKLTEHKKIHTGEKPYTCEECGKAFNHSSHLATHKVIHTGEKPYQCEECGKAFNQSSHLTRHKRIHTGEKPYQCEKCGKAFNQSSNLTGHKKIHTGEKLYKPKRCNSDFENTSKFSKHKRNYAGEKS

SEQ ID NO: 16345 - protein, 498 aa, Homo Sapiens
MELLTFRDVTIEFSLEEWEFLNPAQQSLYRKVMLENYRNLVSLGLTVSKPELISRLEQRQEPWNVKRHETIAKPPAMSSHYTEDLLPEQCMQDSFQKVILRRYGSCGLEDLHLRKDGENVGECKDQKEIYNGLNQCLSTLPSKIFPYNKCVKVFSKSSNLNRENIRHTTEKLFKCMQCGKVFKSHSGLSYHKIIHTEEKLCICEECGKTFKWFSYLTKHKRIHTGEKPYKCEECGKAFNWCSSLTKHKRIHTGEKPYKCEECGKAFHWCSPFVRHKKIHTGEKPYTCEDCGRAFNRHSHLTKHKTIHTGKKPYKCKECGKAFNHCSLLTIHERTHTGEKPYKCEECGKAFNSSSILTEHKVIHSGEKPYKCEKCDKVFKRFSYLTKHKRIHTGEKPYKCEECGKAFNWSSILTEHKRIHTGEKPYNCEECGKAFNRCSHLTRHKKIHTAVKRYKCEECGKAFKRCSHLNEHKRVQRGEKSCKYKKCGEAFNHCSNLTT

SEQ ID NO: 16346 - protein, 524 aa, Homo Sapiens
MKEESAAQLGCCHRPMALGGTGGSLSPSLDFQLFRGDQVFSACRPLPDMVDAHGPSCASWLCPLPLAPGRSALLACLQDLDLNLCTPQPAPLGTDLQGLQEDALSMKHEPPGLQASSTDDKKFTVKYPQNKDKLGKQPERAGEGAPCPAFSSHNSSSPPPLQNRKSPSPLAFCPCPPVNSISKELPFLLHAFYPGYPLLLPPPHLFTYGALPSDQCPHLLMLPQDPSYPTMAMPSLLMMVNELGHPSARWETLLPYPGAFQASGQALPSQARNPGAGAAPTDSPGLERGGMASPAKRVPLSSQTGTAALPYPLKKKNGKILYECNICGKSFGQLSNLKVHLRVHSGERPFQCALCQKSFTQLAHLQKHHLVHTGERPHKCSIPWVPGRNHWKSFQAWREREVCHKRFSSSSNLKTHLRLHSGARPFQCSVCRSRFTQHIHLKLHHRLHAPQPCGLVHTQLPLASLACLAQWHQGALDLMAVASEKHMGYDIDEVKVSSTSQGKARAVSLSSAGTPLVMGQDQNN

SEQ ID NO: 16347 - protein, 378 aa, Homo Sapiens
MISFQESVTFQDVAVDFTAEEWQLLDCAERTLYWDVMLENYRNLISVGCPITKTKVILKVEQGQEPWMVEGANPHESSPESDYPLVDEPGKHRESKDNFLKSVLLTFNKILTMERIHHYNMSTSLNPMRKKSYKSFEKCLPPNLDLLKYNRSYTVENAYECSECGKAFKKKFHFIRHEKNHTRKKPFECNDCGKAYSRKAHLATHQKIHNGERPFVCNDCGKAFMHKAQLVVHQRLHTGEKPYECSQCGKTFTWNSSFNQHVKSHTLEKSFECKECGKTFRYSSSLYKHSRFHTGEKPYQCIICGKAFGNTSVLVTHQRIHTGEKPYSCIECGKAFIKKSHLLRHQITHTGEKPYECNRCGKAFSQKSNLIVHQKIHT

SEQ ID NO: 16348 - protein, 1237 aa, Homo Sapiens
MGDMKTPDFDDLLAAFDIPDIDANEAIHSGPEENEGPGGPGKPEPGVGSESEDTAAASAGDGPGVPAQASDHGLPPPDISVVSVIVKNTVCPEQSEALAGGSAGDGAQAAGVTKEGPVGPHRMQNGFGSPEPSLPGTPHSPAPPSGGTWKEKGMEGKTPLDLFAHFGPEPGDHSDPLPPSAPSPTREGALTPPPFPSSFELAQENGPGMQPPVSSPPLGALKQESCSPHHPQVLAQQGSGSSPKATDIPASASPPPVAGVPFFKQSPGHQSPLASPKVPVCQPLKEEDDDEGPVDKSSPGSPQSPSSGAEAADEDSNDSPASSSSRPLKVRIKTIKTSCGNITRTVTQVPSDPDPPAPLAEGAFLAEASLLKLSPATPTSEGPKVVSVQLGDGTRLKGTVLPVATIQNASTAMLMAASVARKAVVLPGGTATSPKMIAKNVLGLVPQALPKADGRAGLGTGGQKVNGASVVMVQPSKTATGPSTGGGTVISRTQSSLVEAFNKILNSKNLLPAYRPNLSPPAEAGLALPPTGYRCLECGDAFSLEKSLARHYDRRSMRIEVTCNHCARRLVFFNKCSLLLHAREHKDKGLVMQCSHLVMRPVALDQMVGQPDITPLLPVAVPPVSGPLALPALGKGEGAITSSAITTVAAEAPVLPLSTEPPAAPATSAYTCFRCLECKEQCRDKAGMAAHFQQLGPPAPGATSNVCPTCPMMLPNRCSFSAHQRMHKNRPPHVCPECGGNFLQANFQTHLREACLHVSRRVGYRCPSCSVVFGGVNSIKSHIQTSHCEVFHKCPICPMAFKSGPSAHAHLYSQHPSFQTQQAKLIYKCAMCDTVFTHKPLLSSHFDQHLLPQRVSVFKCPSCPLLFAQKRTMLEHLKNTHQSGRLEETAGKGAGGALLTPKTEPEELAVSQGGAAPATEESSSSSEEEEVPSSPEPPRPAKRPRRELGSKGLKGGGGGPGGWTCGLCHSWFPERDEYVAHMKKEHGKSVKKFPCRLCERSFCSAPSLRRHVRVNHEGIKRVYPCRYCTEGKRTFSSRLILEKHVQVRHGLQLGAQSPGRGTTLARGSSARAQGPGRKRRQSSDSCSEEPDSTTPPAKSPRGGPGSGGHGPLRYRSSSSTEQSLMMGLRVEDGAQQCLDCGLCFASPGSLSRHRFISHKKRRGVGKASALGLGDGEEEAPPSRSDPDGGDSPLPASGGPLTCKVCGKSCDSPLNLKTHFRTHGMAFIRARQGAVGDN

SEQ ID NO: 16349 - protein, 276 aa, Homo Sapiens
MAPPPAPLLAPRPGETRPGCRKPGTVSFADVAVYFSPEEWGCLRPAQRALYRDVMQETYGHLGALGFPGPKPALISWMEQESEAWSPAAQDPEKGERLGGARRGDVPNRKEEEPEEVPRAKGPRKAPVKESPEVLVERNPDPAISVAPARAQPPKNAAWDPTTGAQPPAPIPSMDAQAGQRRHVCTDCGRRFTYPSLLVSHRRMHSGERPFPCPECGMRFKRKFAVEAHQWIHRSCSGGRRGRRPGIRAVPRAPVRGDRDPPVLFRHYPDIFEECG

SEQ ID NO: 16350 - protein, 500 aa, Homo Sapiens
MAPPSAPLPAQGPGKARPSRKRGRRPRALKFVDVAVYFSPEEWGCLRPAQRALYRDVMRETYGHLGALGCAGPKPALISWLERNTDDWEPAALDPQEYPRGLTVQRKSRTRKKNGEKEVFPPKEAPRKGKRGRRPSKPRLIPRQTSGGPICPDCGCTFPDHQALESHKCAQNLKKPYPCPDCGRRFSYPSLLVSHRRAHSGECPYVCDQCGKRFSQRKNLSQHQVIHTGEKPYHCPDCGRCFRRSRSLANHRTTHTGEKPHQCPSCGRRFAYPSLLAIHQRTHTGEKPYTCLECNRRFRQRTALVIHQRIHTGEKPYPCPDCERRFSSSSRLVSHRRVHSGERPYACEHCEARFSQRSTLLQHQLLHTGEKPYPCPDCGRAFRRSGSLAIHRSTHTEEKLHACDDCGRRFAYPSLLASHRRVHSGERPYACDLCSKRFAQWSHLAQHQLLHTGEKPFPCLECGRCFRQRWSLAVHKCSPKAPNCSPRSAIGGSSQRGNAH

SEQ ID NO: 16351 - protein, 566 aa, Homo Sapiens
MPCCSHRRCREDPGTSESQEMDPVAFDDVAVNFTQEEWALLDISQRKLYKEVMLETFRNLTSVGKSWKDQNIEYEYQNPRRNFRSLIEKKVNEIKDDSHCGETFTQVPDDRLNFQEKKASPEIKSCDSFVCGEVGLGNSSFNMNIRGDIGHKAYEYQEYGPKPCKCQQPKKAFRYHPSFRTPQRDHTGEKPYACKECGKTFISHSSIQRHVVMHSGDGPYKCKFCGKAFHCLSLYLIHERIHTGEKPYECKQCGKSFSYSATLRIHERTHTGEKPYECQQCGKAFHSPRCYRRHERIHTGEKAYQCKECGKAFTCPQYVRIHERTHSRKKPYECTQCGKALSSLTSFQTHIRMHSGERPYECKICGKGFCSANSFQRHEKTHSGEKPYKCKQCGKAFIHSSSLRYHERIHTGEKPYECKQCGKAFRSSSHLQLHGRTHTGEKPYECQECGKAFRSMKNLQSHERTQTHVRIHSGERPYKCKLCGKGFYCPKSLQRHEKTHTGEKLYECKQCGEAFSSSSSFRYHERTHTGEKPYKCKQCGKAFRAASVLRMHGRTHPEDKPYECKQ

SEQ ID NO: 16352 - protein, 312 aa, Homo Sapiens
MSLCSPTHSAEMSLFLQGPEEMLPLSSEGSEMGSEKEQSPEPHLPEEGEGGKPWRVDDSEGSWIPPGEKEHGQESLSDELQETHPKKPWQKVTVRARELGDPIAHPRHEADEKPFICAQCGKTFNNTSNLRTHQRIHTGEKPYKCSECGKSFSRSSNRIRHERIHLEEKHYKCPKCQESFRRRSDLTTHQQDHLGKRPYRCDICGKSFSQSATLAVHHRTHLEPAPYICCECGKSFSNSSSFGVHHRTHTGERPYECTECGRTFSDISNFGAHQRTHRGEKPYRCTVCGKHFSRSSNLKPFIPLWRMVLYSL

SEQ ID NO: 16353 - protein, 519 aa, Homo Sapiens
MASSPAVDVSCRRREKRRQLDARRSKCRIRLGGHMEQWCLLKERLGFSLHSQLAKFLLDRYTSSGCVLCAGPEPLPPKGLQYLVLLSHAHSRECSLVPGLRGPGGQDGGLVWECSAGHTFSWGPSLSPTPSEAPKPASLPHTTRRSWCSEATSGQELADLESEHDERTQEARLPRRVGPPPETFPPPGEEEGEEEEDNDEDEEEMLSDASLWTYSSSPDDSEPDAPRLLPSPVTCTPKEGETPPAPAALSSPLAVPALSASSLSSRAPPPAEVRVQPQLSRTPQAAQQTEALASTGSQAQSAPTPAWDEDTAQIGPKRIRKAAKRELMPCDFPGCGRIFSNRQYLNHHKKYQHIHQKSFSCPEPACGKSFNFKKHLKEHMKLHSDTRDYICEFCARSFRTSSNLVIHRRIHTGEKPLQCEICGFTCRQKASLNWHQRKHAETVAALRFPCEFCGKRFEKPDSVAAHRSKSHPALLLAPQESPSGPLEPCPSISAPGPLGSSEGSRPSASPQAPTLLPQQ

SEQ ID NO: 16354 - protein, 515 aa, Homo Sapiens
MGLLAFRDVALEFSPEEWECLDPAQRSLYRDVMLENYRNLISLGEDSFNMQFLFHSLAMSKPELIICLEARKEPWNVNTEKTARHSVLSSYLTEDILPEQGLQVSFQKVMLRRYERCCLEKLRLRNDWEIVGEWKGQKASYNGLDLCSATTHSKNFQCNKCVKGFSKFANLNKCKISHTGEKPFKCKECGNVSCMSLIMTQQQRIHIGENPYQCKKCGKAFNECSCFTDCKRIHVGEKHCKCEECNNIFKSCSSLAVVEKNHTEKKTYRCEECGKAFNLCSVLTKHKKIHTGEKPYKCEECGKSFKLFPYLTQHKRIHSREKPYKCEECGKVFKLLSYLTQHRRIHTGEKTFRCEECGKAFNQSSHLTEHRRIHTGEKPYKCEECGKAFTWFSYLIQHKRIHTGQKPYKCEECGKAFTWFSYLTQHKRIHTGEKPYKCDECGKAFNWFSYLTNHKRIHTGEKPYKCEECGKAFGQSSHLSKHKTIHTREKPYKCEECGKAFNHSAQLAVHEKTHT

SEQ ID NO: 16355 - protein, 374 aa, Homo Sapiens
MEPGGEPTGAKESSTLMESLAAVKAAFLAQAPSGSRSAEVQAAQSTEPAAEAGAPEGEGHRGGPPRALGSLGLCENQEARERPGGSPRGPVTSEKTGGQSGLESDVPPNAGPGAEGGGSWKGRPFPCGACGRSFKCSSDAAKHRSIHSGEKPYECSDCGKAFIHSSHVVRHQRAHSGERPYACAECGKAFGQSFNLLRHQRVHTGEKPYACADCGKAFGQRSDAAKHRRTHTGERLYACGECGKRFLHSSNVVRHRRTHHGENPYECRECGQAFSQSSNLLQHQRVHTGERPFACQDCGRAFSRSSFLREHRRIHTGEKPHQCGHCGRAFRALSGFFRHQRLHTGEKPFRCTECGRAFRLSFHLIQHRRVHGAE

SEQ ID NO: 16356 - protein, 545 aa, Homo Sapiens
MKQEDNQGVCAHQDSEDKGMGSDFEDSEDREGDPEEREMGSNPHDTNKREGHPEPEMGSNPQDSRHREAVPDICTEGQLSEEEGVSVRGEEDDQSGVADMAMFPGLSESDSISRSLREDDDESAGENRLEEEEEQPAPPVLPWRRHLSLGSRHRGDKPAHRRFHRLHHPMAVDLGELDSLVASIMDAPTICPDCGESFSPGAAFLQHQRIHRLAEAAAAASLEPFGLAGECDAMVGMMGVGVAGGFGAGPPLARPPREKPFRCGECGKGFSRNTYLTNHLRLHTGERPNLCADCGKSFSWRADLLKHRRLHTGEKPYPCPECGEAFSLSSHLLSHRRAHAAASGAGAAALRPFACGECGKGFVRRSHLANHQRIHTGEKPHGCGECGKRFSWRSDLVKHQRVHTGEKPYMCSECGETFSVSSHLFTHKRTHSGERPYVCRECGKGFGRNSHLVNHLRVHTGEKPFRCGQCEKRFSDFSTLTQHQRTHTGEKPYTCIECGKSFIQSSHLIRHRRIHTGNKPHKCAGCGKGFRYKTHLAQHQKLHLC

SEQ ID NO: 16357 - protein, 642 aa, Homo Sapiens
MEEERKTAELQKNRIQDSVVFEDVAVDFTQEEWALLDLAQRNLYRDVMLENFQNLASLGYPLHTPHLISQWEQEEDLQTVKRELIQGIFMGEHREGFETQLKTNESVASQDICGEKISNEQKIVRFKRNDSWFSSLHENQESCGIDYQNKSHERHLRNHMVENIYECYEENQDGQTFSQVPNLDSLKRNTEVKSCECHECGKAFVDHSSLKSHIRSHTGSKPYQCKECGKAFHFLACFKKHMKTPTEEKPYECKECTKAFSCSSFFRAHMKIHIGKTNYECKECGKGFSCSSSLTEHKRIHSGDKPYECKECGKAFSCSSSLSKHKRIHSGDKPYECKECGKAFSSSSHLIIHIRIHTGEKPYECKECGKAFSESSKLTVHGRTHTGEKPYKCKECGKAYNCPSSLSIHMRKHTGEKPYECLECGKAFYLPTSLNTHVKNQSREKPYECKECGKAFSCPSSFRAHVRDHTGKIQYECKECGKTFSRSSSLTEHLRTHSGEKPYECKECGKAFISSSHLTVHIRTHTGEKPYECKKCGKAFIYPSALRIHMRTHTGEKPYECKECGKAFRHSSYLTVHARMHTGEKPFECLECGKAFSCPSSFRRHVRSHTGEKPYECKECGKAFVCPAYFRRHVKTHTRENI

SEQ ID NO: 16358 - protein, 686 aa, Homo Sapiens
MEVVTFGDVAVHFSREEWQCLDPGQRALYREVMLENHSSVAGLAGFLVFKPELISRLEQGEEPWVLDLQGAEGTEAPRTSKTDSTIRTENEQACEDMDILKSESYGTVVRISPQDFPQNPGFGDVSDSEVWLDSHLGSPGLKVTGFTFQNNCLNEETVVPKTFTKDAPQGCKELGSSGLDCQPLESQGESAEGMSQRCEECGKGIRATSDIALHWEINTQKISRCQECQKKLSDCLQGKHTNNCHGEKPYECAECGKVFRLCSQLNQHQRIHTGEKPFKCTECGKAFRLSSKLIQHQRIHTGEKPYRCEECGKAFGQSSSLIHHQRIHTGERPYGCRECGKAFSQQSQLVRHQRTHTGERPYPCKECGKAFSQSSTLAQHQRMHTGEKAQILKASDSPSLVAHQRIHAVEKPFKCDECGKAFRWISRLSQHQLIHTGEKPYKCNKCTKAFGCSSRLIRHQRTHTGEKPFKCDECGKGFVQGSHLIQHQRIHTGEKPYVCNDCGKAFSQSSSLIYHQRIHKGEKPYECLQCGKAFSMSTQLTIHQRVHTGERPYKCNECGKAFSQNSTLFQHQIIHAGVKPYECSECGKAFSRSSYLIEHQRIHTRAQWFYEYGNALEGSTFVSRKKVNTIKKLHQCEDCEKIFRWRSHLIIHQRIHTGEKPYKCNDCGKAFNRSSRLTQHQKIHMG

SEQ ID NO: 16359 - protein, 446 aa, Homo Sapiens
MEVPPATKFGETFAFENRLESQQGLFPGEDLGDPFLQERGLEQMAVIYKEIPLGEQDEENDDYEGNFSLCSSPVQHQSIPPGTRPQDDELFGQTFLQKSDLSMCQIIHSEEPSPCDCAETDRGDSGPNAPHRTPQPAKPYACRECGKAFSQSSHLLRHLVIHTGEKPYECCECGKAFSQSSHLLRHQIIHTGEKPYECRECGKAFRQSSALTQHQKIHTGKRPYECRECGKDFSRSSSLRKHERIHTGERPYQCKECGKSFNQSSGLSQHRKIHTLKKPHECDLCGKAFCHRSHLIRHQRIHTGKKPYKCDECGKAFSQSSNLIEHRKTHTGEKPYKCQKCGKAFSQSSSLIEHQRIHTGEKPYECCQCGKAFCHSSALIQHQRIHTGKKPYTCECGKAFRHRSALIEHYKTHTREKPYVCNLCGKSFRGSSHLIRHQKIHSGEKL

SEQ ID NO: 16360 - protein, 531 aa, Homo Sapiens
MGFLHVGQDGLELPTSGDPPASASQSAGITGVSHRTQPPCFEGLTSKDLVREEKTRKRKRKAKESGMALLQGLLTFRDVAIEFSQEEWKCLDPAQRTLYRDVMLENYRNLVSLDTSSKCMMKMFSSTGQGNTEVVHTGTLQIHASHHIGDTCFQEIEKDIHDFVFQWQENETNGHEALMTKTKKLMSSTERHDQRHAGNKPIKNELGSSFHSHLPEVHIFHPEGKIGNQVEKAINDAFSVSASQRISCRPKTRISNKYRNNFLQSSLLTQKREVHTREKSFQRNESGKAFNGSSLLKKHQIIHLGDKQYKCDVCGKDFHQKRYLACHRCHTGENPYTCNECGKTFSHNSALLVHKAIHTGEKPYKCNECGKVFNQQSNLARHHRVHTGEKPYKCEECDKVFSRKSHLERHRRIHTGEKPYKCKVCDKAFRRDSHLAQHTVIHTGEKPYKCNECGKTFVQNSSLVMHKVIHTGEKRYKCNECGKVFNHKSNLACHRRLHTGEKPYKCNECGKVFNRKSNLERHHRLHTGKKS

SEQ ID NO: 16361 - protein, 129 aa, Homo Sapiens
MREKSFQCNESGKAFNCSSLLKKCQIIHLGEKKYKCDICGKVFNQKRYLAYHHRCHTGEKPYKCNQCGKTFSYKSSLVIHKAIHTGEKPHKCNECGKVFNQKAYLASHHRLHTGEKPYKCEECDKVFSR

SEQ ID NO: 16362 - protein, 590 aa, Homo Sapiens
MSDSPAGSNPRTPESSGSGSGGGGKRPAVPAAVSLLPPADPLRQANRLPIRVLKMLSAHTGHLLHPEYLQPLSSTPVSPIELDAKKSPLALLAQTCSQIGKPDPPPSSKLNSVAAAANGLGAEKDPGRSAPGAASAAAALKQLGDSPAEDKSSFKPYSKGSGGGDSRKDSGSSSVSSTSSSSSSSPGDKAGFRVPSAACPPFPPHGAPVSASSSSSSPGGSRGGSPHHSDCKNGGGVGGGELDKKDQEPKPSPEPAAVSRGGGGEPGAHGGAESGASGRKSEPPSALVGAGHVAPVSPYKPGHSVFPLPPSSIGYHGSIVGAYAGYPSQFVPGLDPSKSGLVGGQLSGGLGLPPGKPPSSSPLTGASPPSFLQGLCRDPYCLGGYHGASHLGGSSCSTCSAHDPAGPSLKAGGYPLVYPGHPLQPAALSSSAAQAALPGHPLYTYGFMLQNEPLPHSCNWVAASGPCDKRFATSEELLSHLRTHTALPGAEKLLAAYPGASGLGSAAAAAAAAASCHLHLPPPAAPGSPGSLSLRNPHTLGLSRYHPYGKSHLSTAGGLAVPSLPTAGPYYSPYALYGQRLASASALGYQ

SEQ ID NO: 16363 - protein, 412 aa, Homo Sapiens
MTFTFQSEDLKRDCGKKMSHQHVFSLAMEEDVKTADTKKASRILDHEKENTRSICLLEQKRKVVSSNIDVPPARKSSEELDMDKVTAAMVLTSLSTSPLVRSPPVRPNESLSGSWKEGGCVPSSTSSSGYWSWSAPSDQSNPSTPSPPLSADSFKPFRSPAQPDDGIDEAEASNLLFDEPIPRKRKNSMKVMFKCLWKNCGKVLSTAAGIQKHIRTIHLGRVGDSDYSDGEEDFYYTEIKLNTDSVADGLSSLAPVSPSQSLASPPTFPIPDSSRTETPCAKTETKLMTPLSRSAPTTLYLVHTDHAYQATPPVTIPGSAKFTPNGSSFSISWQSPPVTFTGIPVSPTHHPVGTGEQRQHAHTVLSSPPRGTVSLRKPRGEGKKCRKVYGMENRDMWCTACRWKKACQRFLD

SEQ ID NO: 16364 - protein, 300 aa, Homo Sapiens
MHSLKKVTFEDVAIDFTQEEWAMMDTSKRKLYRDVMLENISHLVSLGYQISKSYIILQLEQGKELWREGREFLQDQNPDRESALKKKHMISMHPITRKDASTSMTMENSLILEDPFECNDSGEDCTHSSTITQRLLTHSGKKPYVSKQCGKSLRNLFSPKPHKQIHTKGKSYQCNLCEKAYTNCFRLRRHKMTHTGERPYACHLCGKAFTQCSHLRRHEKTHTGERPYKCHQCGKAFIQSFNLRRHERTHLGKKCYECDKSGKAFSQSSGFRGNKIIHTGEKPHACLLCGKAFSLSSDLR

SEQ ID NO: 16365 - protein, 300 aa, Homo Sapiens
MHSLEKVTFEDVAIDFTQEEWDMMDTSKRKLYRDVMLENISHLVSLGYQISKSYIILQLEQGKELWREGRVFLQDQNPDRESALKKKHMISMHPIIRKDASTSMTMENSLILEDPFEYNDSGEDCTHSSTITQCLLTHSGKKPCVSKQCGKSLRNLLSPKPRKQIHTKGKSYQCNLCEKAYTNCFYLRRHKMTHTGERPYACHLCGKAFTQCSHLRRHEKTHTGERPYKCHQCGKAFIQSFNLRRHERTHLGQKCYECDKSGKAFSQSSGFRGNKIIHIGEKPHACLLCGKAFSLSSDLR

SEQ ID NO: 16366 - protein, 300 aa, Homo Sapiens
MHSLKKVTFEDVAIDFTQEEWAMMDTSKRKLYRDVMLENISHLVSLGYQISKSYIILQLEQGKELWQEGREFLQDQNPDRESALKKTHMISMHPIIRKDAPTSMTMENSLILEDPFECNDSGEDCTHSSTIIQCLLTHSGKKPYVSKQCGKSLSNLLSPKPHKQIHTKGKSYQCNLCEKAYTNCFHLRRPKMTHTGERPYTCHLCRKAFTQCSHLRRHEKTHTGERPYKCHQCGKAFIQSFNLRRHERTHLGEKWYECDNSGKAFSQSSGFRGNKIIHTGEKPHACLLCGKAFSLSSDLR

SEQ ID NO: 16367 - protein, 300 aa, Homo Sapiens
MHSLKKLTFEDVAIDFTQEEWAMMDTSKRKLYRDVMLENISHLVSLGYQISKSYIILQLEQGKELWREGRVFLQDQNPNRESALKKTHMISMHPITRKDASTSMTMENSLILEDPFECNDSGEDCTRSSTITQCLLTHSGKKPYVSKQCGKSLRNLLSTEPHKQIHTKGKSYQCNLCEKAYTNCFHLRRHKMTHTGERPYACHLCRKAFTQCSHLRRHEKTHTGQRPYKCHQYGKVFIQSFNLQRHERTHLGKKCYECDKSGKAFSQSSGFRGNKIIHTGEKPHACLLCGKAFSLSSNLR

SEQ ID NO: 16368 - protein, 76 aa, Homo Sapiens
MARGQQKIQSQQKNAKKQAGQKKKQGHDQKAAAKAALIYTCTVCRTQMPDPKTFKQHFESKHPKTPLPPELADVQA

SEQ ID NO: 16369 - protein, 371 aa, Homo Sapiens
MDMAQEPVTFRDVAIYFSREEWACLEPSQRALYRDVMLDNFSSVAALGFCSPRPDLVSRLEQWEEPWVEDRERPEFQAVQRGPRPGARKSADPKRPCDHPAWAHKKTHVRRERAREGSSFRKGFRLDTDDGQLPRAAPERTDAKPTAFPCQVLTQRCGRRPGRRERRKQRAVELSFICGTCGKALSCHSRLLAHQTVHTGTKAFECPECGQTFRWASNLQRHQKNHTREKPFCCEACGQAFSLKDRLAQHRKVHTEHRPYSCGDCGKAFKQKSNLLRHQLVHTGERPFYCADCGKAFRTKENLSHHQRVHSGEKPYTCAECGKSFRWPKGFSIHRRLHLTKRFYECGHCGKGFRHLGFFTRHQRTHRHGEV

SEQ ID NO: 16370 - protein, 499 aa, Homo Sapiens
MKRHEMAAKPPAMCSHFAKDLRPEQYIKNSFQQVILRRYGKCGYQKGCKSVDEHKLHKGGHKGLNRCVTTTQSKIVQCDKYVKVFHKYSNAKRHKIRHTGKNPFKCKECGKSFCMLSQLTQHEIIHTGEKPYKCEECGKAFKKSSNLTNHKIIHTGEKPYKCEECGKAFNQSSTLTRHKIIHTGEKLYKCEECGKAFNRSSNLTKHKIVHTGEKPYKCEECGKAFKQSSNLTNHKKIHTGEKPYKCGECGKAFTLSSHLTTHKRIHTGEKPYKCEECGKAFSVFSTLTKHKIIHTEEKPYKCEECGKAFNRSSHLTNHKVIHTGEKPYKCEECGKAFTKSSTLTYHKVIHTGKKPYKCEECGKAFSIFSILTKHKVIHTEDKPYKCEECGKTFNYSSNFTNHKKIHTGEKPYKCEECGKSFILSSHLTTHKIIHTGEKPYKCKECGKAFNQSSTLMKHKIIHTGEKPYKCEECGKAFNQSPNLTKHKRIHTKEKPYKCK

SEQ ID NO: 16371 - protein, 641 aa, Homo Sapiens
MDSVVFEDVAVNFTQEEWALLGPSQKKLYRDVMQETFVNLASIGENWEEKNIEDHKNQGRKLRSHMVERLCERKEGSQFGETISQTPNPKPNKKTFTRVKPYECSVCGKDYMCHSSLNRHMRSHTEHRSYEYHKYGEKSYECKECGKRFSFRSSFRIHERTHTGEKPYKCKQCGKAFSWPSSFQIHERTHTGEKPYECKECGKAFIYHTTFRGHMRMHTGEKPYKCKECGKTFSHPSSFRNHERTHSGEKPYECKQCGKAFRYYQTFQIHERTHTGEKPYQCKQCGKALSCPTSFRSHERIHTGEKPYKCKKCGKAFSFPSSFRKHERIHTGEKPYDCKECGKAFISLPSYRRHMIMHTGNGPYKCKECGKAFDCPSSFQIHERTHTGEKPYECKQCGKAFSCSSSFRMHERTHTGEKPHECKQCGKAFSCSSSVRIHERTHTGEKPYECKQCGKAFSCSSSFRMHERIHTGEKPYECKQCGKAFSFSSSFRMHERTHTGEKPYECKQCGKAFSCSSSFRMHERTHTGEKPYECKQCGKAFSCSSSIRIHERTHTGEKPYECKQCGKAFSCSSSVRMHERTHTGVKPYECKQCDKAFSCSRSFRIHERTHTGEKPYACQQCGKAFKCSRSFRIHERVHSGE

SEQ ID NO: 16372 - protein, 489 aa, Homo Sapiens
MKELDPKNDISEDKLSVVGEATGGPTRNGARGPGSEGVWEPGSWPERPRGDAGAEWEPLGIPQGNKLLGGSVPACHELKAFANQGCVLVPPRLDDPTEKGACPPVRRGKNFSSTSDLSKPPMPCEEKKTYDCSECGKAFSRSSSLIKHQRIHTGEKPFECDTCGKHFIERSSLTIHQRVHTGEKPYACGDCGKAFSQRMNLTVHQRTHTGEKPYVCDVCGKAFRKTSSLTQHERIHTGEKPYACGDCGKAFSQNMHLIVHQRTHTGEKPYVCPECGRAFSQNMHLTEHQRTHTGEKPYACKECGKAFNKSSSLTLHQRNHTGEKPYVCGECGKAFSQSSYLIQHQRFHIGVKPFECSECGKAFSKNSSLTQHQRIHTGEKPYECYICKKHFTGRSSLIVHQIVHTGEKPYVCGECGKAFSQSAYLIEHQRIHTGEKPYRCGQCGKSFIKNSSLTVHQRIHTGEKPYRCGECGKTFSRNTNLTRHLRIHT

SEQ ID NO: 16373 - protein, 664 aa, Homo Sapiens
MEGFMDSGTQTDAVVVLSLAQAAVLGLVSENELFGATISAEAFYPDLGPELSGAAMGEPEPPGPDVYQLACNGRALEEPAEEEVLEVEAACEKHTRRKTRPPVRLVPKVKFEKVEEEEQEVYEVSVPGDDKDAGPAEAPAEAASGGCDALVQSSAVKMIDLSAFSRKPRTLRHLPRTPRPELNVAPYDPHFPAPARDGFPEPSMALPGPEALPTECGFEPPHLAPLSDPEAPSMESPEPVKPEQGFVWQEASEFEADTAGSTVERHKKAQLDRLDINVQIDDSYLVEAGDRQKRWQCRMCEKSYTSKYNLVTHILGHNGIKPHSCPHCSKLFKQPSHLQTHLLTHQGTRPHKCQVCHKAFTQTSHLKRHMLLHSEVKPYSCHFCGRGFAYPSELKAHEVKHESGRCHVCVECGLDFSTLTQLKRHLASHQGPTLYQCLECDKSFHYRSQLQNHMLKHQNVRPFVCTECGMEFSQIHHLKQHSLTHKGVKEFKCEVCGREFTLQANMKRHMLIHTSVRPYQCHICFKTFVQKQTLKTHMIVHSPVKPFKCKVCGKSFNRMYNLLGHMHLHAGSKPFKCPYCSSKFNLKGNLSRHMKVKHGVMDIGLDSQDPMMELTGTDPSELDGQQEMEDFEENAYSYASVDSSAEASVLTEQAMKEMAYYNVL

SEQ ID NO: 16374 - protein, 761 aa, Homo Sapiens
MDSGGGSLGLHTPDSRMAHTMIMQDFVAGMAGTAHIDGDHIVVSVPEAVLVSDVVTDDGITLDHGLAAEVVHGPDIITETDVVTEGVIVPEAVLEADVAIEEDLEEDDGDHILTSELITETVRVPEQVFVADLVTGPNGHLEHVVQDCVSGVDSPTMVSEEVLVTNSDTETVIQAAGGVPGSTVTIKTEDDDDDDVKSTSEDYLMISLDDVGEKLEHMGNTPLKIGSDGSQEDAKEDGFGSEVIKVYIFKAEAEDDVEIGGTEIVTESEYTSGHSVAGVLDQSRMQREKMVYMAVKDSSQEEDDIRDERRVSRRYEDCQASGNTLDSALESRSSTAAQYLQICDGINTNKVLKQKAKKRRRGETRQWQTAVIIGPDGQPLTVYPCHICTKKFKSRGFLKRHMKNHPDHLMRKKYQCTDCDFTTNKKVSFHNHLESHKLINKVDKTHEFTEYTRRYREASPLSSNKLILRDKEPKMHKCKYCDYETAEQGLLNRHLLAVHSKNFPHVCVECGKGFRHPSELKKHMRTHTGEKPYQCQYCIFRCADQSNLKTHIKSKHGNNLPYKCEHCPQAFGDERELQRHLDLFQGHKTHQCPHCDHKSTNSSDLKRHIISVHTKDFPHKCEVCDKGFHRPSELKKHSDIHKGRKIHQCRHCDFKTSDPFILSGHILSVHTKDQPLKCKRCKRGFRQQNELKKHMKTHTGRKIYQCEYCEYSTTDASGFKRHVISIHTKDYPHRCEFCKKGFRRPSEKNQHIMRHHKEALM

SEQ ID NO: 16375 - protein, 430 aa, Homo Sapiens
MEEEEMNDGSQMVRSQESLTFQDVAVDFTREEWDQLYPAQKNLYRDVMLENYRNLVALGYQLCKPEVIAQLELEEEWVIERDSLLDTHPDGENRPEIKKSTTSQNISDENQTHEMIMERLAGDSFWYSILGGLWDFDYHPEFNQENHKRYLGQVTLTHKKITQERSLECNKFAENCNLNSNLMQQRIPSIKIPLNSDTQGNSIKHNSDLIYYQGNYVRETPYEYSECGKIFNQHILLTDHIHTAEKPSECGKAFSHTSSLSQPQMLLTGEKPYKCDECGKRFSQRIHLIQHQRIHTGEKPFICNGCGKAFRQHSSFTQHLRIHTGEKPYKCNQCGKAFSRITSLTEHHRLHTGEKPYECGFCGKAFSQRTHLNQHERTHTGEKPYKCNECGKAFSQSAHLNQHRKIHTREKLCEYKCEQTVRHSPSFSST

SEQ ID NO: 16376 - protein, 554 aa, Homo Sapiens
MNVMLENYKNLVFLAGIAVSKQDPITSLEQEKEPWNMKICEMVDESPAMCSSFTRDLWPEQDIKDSFQQVILRRHGKCEHENLQLRKGSANVVECKVYKKGYELNQCLTTTQSKIFPCDKYIKVFHKIFNSNRHKTRHTGEKPFKCKKCDESFCMLLHLHQHKRIHIRENSYQCEECDKVFKRFSTLTRHKRVHTGEKPFKCEECGKAFKHSSTLTTHKMIHTGEKPYRCEECGKAFYHSSHLTTHKVIHTGEKPFKCEECGKAFNHPSALTTHKFIHVKEKPYKCEECDKAFNRFSYLTKHKIIHSGEKSYKCEQCGKGFNWSSTLTKHKRIHTGEKPYKCEECGKAFNVSSHLTTHKMIHTGEKPYKCEECGKAFNHSSKLTIHKIIHTGEKPYKCEECGKAFNQSSNLTKHKIIHTGEKLYKCEECGKAFNRSSNLTTHKRIHTGEKPYKCEECGKAFNRSSNLTKHNIIHTGEKSYKCEECGKAFNQSSTLTKHRKIQQGMVAHACNPNTLRGLGEQIARSGVQDQPGQHGKTPSLLKIQKFAGCGGRRL

SEQ ID NO: 16377 - protein, 495 aa, Homo Sapiens
MAKRPGPPGSREMGLLTFRDIAIEFSLAEWQCLDHAQQNLYRDVMLENYRNLVSLGIAVSKPDLITCLEQNKEPQNIKRNEMVAKHPVTCSHFTQDLQSEQGIKDSLQKVILRRYGKCGQEDLQVKKCCKSVGECEVHKGGYNYVNQCLSATQNKTFQTHKCVKVFGKFSNSNRHKTRHTGKKHFKCKNDGKSFCMLSRLNQHQIIHTREKSYKCEECGKSFNCSSTLTRHKRIHTGEKPYRCEECGKAFSWSASLTKHKRIHTGEKPYTCEERGKVFSRSTLTNYKRIHTGEKPYTCEECGKAFSRSSTLTNHKRIHTGERPYKCEECGKAFSLSSTLKKHKIVHTGEKLYTCEECGKAFTFSSTLNTHKRIHTGEKPYTCEECGKAFSLPSTFTYHKRTHTGEKPYKCEECGKAFNCSSTLKKHKIIHTGEKLYKCKECGKAFTFSSTLNTHKRIHTGEKPYKCEECDQTFKWHSSLANHKNMHTGEKPYKYE

SEQ ID NO: 16378 - protein, 904 aa, Homo Sapiens
MLETYNSLVSLQELVSFEEVAVHFTWEEWQDLDDAQRTLYRDVMLETYSSLVSLGHCITKPEMIFKLEQGAEPWIVEETPNLRLSAVQIIDDLIERSHESHDRFFWQIVITNSNTSTQERVELGKTFNLNSNHVLNLIINNGNSSGMKPGQFNDCQNMLFPIKPGETQSGEKPHVCDITRRSHRHHEHLTQHHKIQTLLQTFQCNEQGKTFNTEAMFFIHKRVHIVQTFGKYNEYEKACNNSAVIVQVITQVGQPTCCRKSDFTKHQQTHTGEKPYECVECEKPSISKSDLMLQCKMPTEEKPYACNWCEKLFSYKSSLIIHQRIHTGEKPYGCNECGKTFRRKSFLTLHERTHTGDKPYKCIECGKTFHCKSLLTLHHRTHSGEKPYQCSECGKTFSQKSYLTIHHRTHTGEKPYACDHCEEAFSHKSRLTVHQRTHTGEKPYECNECGKPFINKSNLRLHQRTHTGEKPYECNECGKTFHRKSFLTIHQWTHTGEKPYECNECGKTFRCKSFLTVHQRTHAGEKPYACNECGKTYSHKSYLTVHHRTHTGEKPYECNECGKSFHCKSFLTIHQRTHAGKKPYECNECEKTFINKLNLGIHKITHTGERPYECNECGKTFRQKSNLSTHQGTHTGEKPYVCGKTFHRKSFLTIHQRTHTGKNRMDVMNVEKLFVRNHTLLYIRELTPGKSPMNVMNVENPFIRRQIFRSIKVFTRGRNPMNVANVEKPCQKSVLTVHHRTHTGEKPYECNECGKTFCHKSNLSTHQGTHSGEKPYECDECRKTFYDKTVLTIHQRTHTGEKPFECKECRKTFSQKSKLFVHHRTHTGEKPFRCNECRKTFSQKSGLSIHQRTHTGEKPYECKECGKTFCQKSHLSRHQQTHIGEKSDVAEAGYVFPQNHSFFP

SEQ ID NO: 16379 - protein, 478 aa, Homo Sapiens
MELLTFKDVAIEFSPEEWKCLDTSQQNLYRDVMLENYRNLVSLGVSISNPDLVTSLEQRKEPYNLKIHETAARPPAVCSHFTQNLWTVQGIEDSFHKLIPKGHEKRGHENLRKTCKSINECKVQKGGYNRINQCLLTTQKKTIQSNICVKVFHKFSNSNKDKIRYTGDKTFKCKECGKSFHVLSRLTQHKRIHTGENPYTCEECGKAFNWSSILTKHKRIHAREKFYKCEECGKGFTRSSHLTKHKRIHTGEKPYICEKCGKAFNQSSTLNLHKRIHSAQKYYKCEECGKAFKWSSSLNEHKRIHAGEKPFSCEECGNVFTTSSDFAKHKRIHTGEKPYKCEECGKSFNRSTTLTTHKRIHTGEKPYTCEECGKAFNWSSTLNVHKRIHSGKNPYKCEDCGKAFKVFANLHNHKKIHTGEKPYICKQCGKAFKQSSHLNKHKKIHTVDKPYKCKECGKAFKQYSNLPQHKRTHTGGKF

SEQ ID NO: 16380 - protein, 126 aa, Homo Sapiens
MGLLTFRDVAIEFSREEWEHLDSDQKLLYGDVMLENYGNLVSLGLAVSKPDLITFLEQRKEPWNVKSAETVAIQPDIFSHDTQGLLRKKLIEASFQKVILDGYGSCGPQNLNLRKEWESEGKIILW

SEQ ID NO: 16381 - protein, 911 aa, Homo Sapiens
MCSHFTQDFLPVQGIEDSFHKLILRRYEKCGHDNLQLRKGCKSMNVCKVQKGVYNGINKCLSNTQSKIFQCNARVKVFSKFANSNKDKTRHTGEKHFKCNECGKSFQKFSDLTQHKGIHAGEKPYTCEERGKDFGWYTDLNQHKKIHTGEKPYKCEECGKAFNRSTNLTAHKRIHNREKAYTGEDRDRAFGWSTNLNEYKKIHTGDKPYKCKECGKAFMHSSHLNKHEKIHTGEKPYKCKECGKVISSSSSFAKHKRIHTGEKPFKCLECGKAFNISTTLTKHRRIHTGEKPYTCEVCGKAFRQSANLYVHRRIHTGEKPYTCGECGKTFRQSANLYVHRRIHTGEKPYKCEDCGKAFGRYTALNQHKKIHTGEKPYKCEECGKAFNSSTNLTAHKRIHTREKPYTCEDRGRAFGLSTNLNEYKKIHTGDKPYKCKECGKAFIHSLHLNKHEKIHTGKKPYKCKQCGKVITSSSSFAKHKRIHTGEKPFECLECGKAFTSSTTLTKHRRIHTGEKPYTCEVCGKAFRQSAILYVHRRIHTGEKPYTCEECGKTFRQSANLYVHRRIHTGEKPYKCEECGKAFGRYTDLNQHKKIHTGEKLYKCEECGKDFVWYTDLNQQKKIYTGEKPYKCEECGKAFAPSTDLNQHTKILTGEQSYKCEECGKAFGWSIALNQHKKIHTGEKPYKCEECGKAFSRSRNLTTHRRVHTREKPYKCEDRGRSFGWSTNLNEYKKIHTGDKLYKCKECGKVFKQSSHLNRHEKIHTGKKPYKCKECGKVITSSSSFAKHKRIHTGEKPFKCLECGKAFTSSTTLTKHRRIHTGEKPYTCEECGKAFRQSAILYVHRRIHTGEKPYTCGECGKTFRQSANLYAHKKIHTGEKPYTCGDCGKTFRQSANLYAHKKIHTGDKTIQV

SEQ ID NO: 16382 - protein, 619 aa, Homo Sapiens
MGPLTFMDVAIEFSVEEWQCLDTAQQNLYRNVMLENYRNLVFLGIAVSKPDLITCLEQGKEPWNMERHEMVAKPPGMCCYFAQDLRPEQSIKASLQRIILRKYEKCGHHNLQLKKGYKSVDEYKVHKGSYNGFNQCLTTTQSKIFQCDKYVKDFHKFSNSNRHKTEKNPFKCKECGKSFCVLSHLTQHKRIHTTVNSYKLEECGKAFNVSSTLSQHKRIHTGQKHYKCEECGIAFNKSSHLNTHKIIHTGEKSYKREECGKAFNISSHLTTHKIIHTGENAYKCKECGKAFNQSSTLTRHKIIHAGEKPYICEHCGRAFNQSSNLTKHKRIHTGDKPYKCEECGKAFNVSSTLTQHKRIHTGEKPYKCEECGKAFNVSSTLTQHKRIHTGEKPYKCEECGKAFNTSSHLTTHKRIHTGEKPYKCEECGKAFNQFSQLTTHKIIHTGEKPYKCKECGKAFKRSSNLTEHRIIHTGEKPYKCEECGKAFNLSSHLTTHKKIHTGEKPYKCKECGKAFNQSSTLARHKIIHAGEKPYKCEECGKAFYQYSNLTQHKIIHTGEKPYKCEECGKAFNWSSTLTKHKVIHTGEKPYKCKECGKAFNQCSNLTTHKKIHAVEKSDK

SEQ ID NO: 16383 - protein, 738 aa, Homo Sapiens
MGLLTFRDVAIEFSLEEWQCLDTAQKNLYRNVMLENYRNLAFLGIAVSKPDLIICLEKEKEPWNMKRDEMVDEPPGICPHFAQDIWPEQGVEDSFQKVILRRFEKCGHENLQLRKGCKSVDECKVHKEGYNGLNQCFTTTQGKASQCGKYLKVFYKFINLNRYKIRHTRKKPFKCKNCVKSFCMFSHKTQHKSIYTTEKSYKCKECGKTFNWSSTLTNHKKTHTEEKPYKCEEYGKAFNQSSNYTTHKVTHTGEKPYKCEECGKAFSQSSTLTIHKRIHTGEKPCKCEECGKAFSQPSALTIHKRMHIGEKPYKCEECGKAFVWSSTLTRHKRLHSGEKPYKCEECAKAFSQFGHLTTHRIIHTGEKPYKCEECGKAFIWPSTLTKHKRIHTGEKPYKCEECGKAFHRSSNLTKHKIIHTGEKPYKCEECGKAFIWSSNLTEHKKIHTREKPYKCEECSKAFSRSSALTTHKRMHTGEKPYKCEECGKAFSQSSTLTAHKIIHTGEKPYKCEECGKAFILSSTLSKHKRIHTGEKPYKCEECGKTFNQSSNLSTHKIIHTGEKPYKCEECGKAFNRSSNLSTHKIIHTGEKPYKCDECGKSFIWSSTLFKHKRIHTGEKPYKCEECGKAFNHSQILLHIRHKRMHTGEKPYKCEECGKSFNLSSTFIKHKVIHTGVKLYKCEECGKVFFWSSALTRHKKIHAGQQPYKWEKIGKAFNQSSHLTTDKITHIGEKSYKCE

SEQ ID NO: 16384 - protein, 499 aa, Homo Sapiens
MRVLTFRDVAVEFSPEEWECLDSAQQRLYRDVMLENYGNLFSLGLAIFKPDLITYLEQRKEPWNARRQKTVAKHPAGSLHFTAEILLEHDINDSFQKVILRKSGSCDLNTLRLKKDYQRVGNCKGQKSSYNGIHQCLSATRSKTCQYNKCGKAFGLCSIFTEHKKIFSREKCYKCEECGKDCRLSDFTIQKRIHTADRSYKCEECGKACKKFSNLTEHNRVHTGKKPYKCEECGKTFTCSSALTKHKRNHTGDRPYKCEECHKAFRCCSDLTKHKRIHTGEKPYKCKECHKAFRCCSDLTKHKRIHTGEKPYKCNECGKAFMWISALSQHNRIHTGEKPYICEECGKAFTYSSTLISHKRIHMELRPYKCEECGKTFKWFSDLTNHKRIHTGEKPYKCEECGKSFTCSSNLIKHKRIHMEVRPYKCEECGKTFKWFPDLTNHKRIHTGEKPYKCEECGKTFTCSSSLIKHKRSHTGDRPTSAKNVAKPLGGSQTLLNIR

SEQ ID NO: 16385 - protein, 1252 aa, Homo Sapiens
MPGAPGSLEMGPLTFRDVTIEFSLEEWQCLDTVQQNLYRDVMLENYRNLVFLGMAVFKPDLITCLKQGKEPWNMKRHEMVTKPPVMRSHFTQDLWPDQSTKDSFQEVILRTYARCGHKNLRLRKDCKSANEGKMHKEGYNKLNQCRTATQRKIFQCNKHMKVFHKYSNRNKVRHTKKKTFKCIKCSKSFFMLSCLIRHKRIHIRQNIYKCEERGKAFKSFSTLTKHKIIHTEDKPYKYKKCGNAFKFSSTFTKHKRIHTGETPFRCEECGKAFNQSSNLTDHKRIHTGEKTYKCEECGKAFKGSSNFNAHKVIHTAEKPYKCEDCGKTFNHFSALRKHKIIHTGKKPYKREECGKAFSQSSTLRKHEIIHTGEKPYKCEECGKAFKWSSKLTVHKVVHTGEKPYKCEECGKAFSQFSTLKKHKIIHTGKKPYKCEECGKAFNSSSTLMKHKIIHTGEKPYKCEECGKAFRQSSHLTRHKAIHTGEKPYKCEECGKAFNHFSDLRRHKIIHTGKKPYKCEECGKAFSQSSTLRNHQIIHTGEKPYKCEECGKAFKWSSKLTVHKVIHTGEKPCKCEECGKAFKHFSALRKHKVIHTREKLYKCEECGKAFNNSSILAKHKIIHTGKKPYKCEECGKAFRQSSHLTRHKAIHTGEKPYKCEECGKAFSHFSALRRHKIIHTGKKPYKCEECGKAFSHFSALRRHKIIHTGEKPYKCEECGKAFKWSSKLTVHKVIHTAEKPCKCEECGKSFKHFSALRKHKVIHTREKLYKCEECVKAFNSFSALMKHKVIHTGEKPYKCEECGKAFKWSSKLTVHKVIHTGEKPCKCEECGKAFKHFSALRKHKVIHTGKKPYKCEECGKAFSQSSSLRKHEIIHSGEKPYKCEECGKAFKWLSKLTVHKVIHTAEKPCKCEECGKAFKHFSALRKHKIIHTGKKPYKCEECGKAFNDSSTLMKHKIIHTGKKPYKCAECGKAFKQSSHLTRHKAIHTGEKPYKCEECGKDFNNSSTLKKHKLIHTREKLYKCEECVKAFNNFSALMKHKIIHTGEKPYKCEECGKAFKWSSKLTEHKVIHTGEKPCKCEECDKAFKHFSALRKHKVIHTGKKPYQCDECGKAFNNSSTLTKHKIIHTGEKPYKCEECGKAFSQSSILTKHKIIHSVEKPYKCEECGKAFNQSSHLTRHKTIHTGEKPYKCEECGKAFIQCSYLIRHKTIHTREKPTNVKKVPKLLSNPHTLLDKTIHTGEKPYKCEECAKAF

SEQ ID NO: 16386 - protein, 503 aa, Homo Sapiens
MGALTFRDVAIEFSLEEWQCLDTEQQNLYRNVMLDNYRNLVFLGIAVSKPDLITCLEQEKEPWNLKTHDMVAKPPVICSHIAQDLWPEQGIKDYFQEVILRQYKKCRHENLLLRKGCKNVDEFKMHKKGYNRHNQCLTTSHSKIFQCDKYVKVFHKFSNSNRHKIRHTSKKPFKCKECGKLFCILSHLAQHKKIHTGEKSYKCEEYGKAFNESSNCTTHKRITEKKPYKCKECGKAFNWFSHFTTHKRIHTGEKPYQCEKCGKFFNQSTNLTTHKRIHTGEKPYKCEECGKAFNQSSNLTEHKKIHTKEQPYKCEKCGKAFKWSSTLTKHKRIHNGEKPYKCEECGKAFNRSSTLNRHKITHTGGKPYKYKECGKAFNQSSTLTIHKIIHTVEKFYKCEECGKAFSRISHLTTHKRIHTGEKPYKCEECGRAFNQSSTLTTHKRIHTGEKPYECEECGKAFNRSSTLTTHKIIHSGEKIYKCKECGKAFRRFSHLTRHKTIHT

SEQ ID NO: 16387 - protein, 585 aa, Homo Sapiens
MELLTFRDVAIEFSPEEWKCLDPAQQNLYRDVMLENYRNLISLGVAISNPDLVIYLEQRKEPYKVKIHETVAKHPAVCSHFTQDFLPVQGIEDSFHKLILRRYEKCGHENLELRKSCKRKVQKGGYNEFNQCLSTIQSKIFQCNVHVKVFSTFSNSNQRRIRHTGEKHFKECGKSFQKFSDLTQHQGIHAGEKPYTCEECGKDFKWYLIFNEYEIIHTGEKPFTCEECGNIFTTSSNFAKHKVHTGEKSYKYEECGKAFNRSSTLTKHKRIHAEEKPFTCEECGKIITSSSNVAKHKKIHTGEKLYKCQECGKVFNRSTTLTKHNRIHTGEKPYTCEECGKAFSRSSVLNEHKRIHTGEKPYKCEQCGKAFRQSATLNKHKSIHTGEKPYTCEECGKAFSRFTTLNEHKRIHTGERPHKCEECGKAFGWSTDLNKHKIIHTGEKPYKCEECGKAFGWSAYLSKHKKIHTGEKPYRCEECGKAFLCSRALNKHKTIHTGEKPYECEECGKAFGWSTYLSKHKKIHTGEKPYRCEECGKAFRRSRVLNKYKTIHTGDKTPKCKGCGKAFKWSSYLNQHNKIYTGEKL

SEQ ID NO: 16388 - protein, 412 aa, Homo Sapiens
MAKRPGPPGSREMGLLTFRDIAIEFSLAEWQCLDHAQQNLYRDVMLENYRNLFSLGMTVSKPDLIACLEQNKEPQNIKRNEMAAKHPVTCSHFNQDLQPEQSIKDSLQKVIPRTYGKCGHENLQLKKCCKRVDECEVHKGGYNDLNQCLSNTQNKIFQTHKCVKVFSKFSNSNRHNARYTGKKHLKCKKYGKSFCMFSHLNQHQIIHTKEKSYKCEECGKSFNHSSSGTTHKRILTGEKPYRCEECGKAFRWPSNLTRHKRIHTGEKPYACEECGQAFRRSSTLTNHKRIHTGERPYKCEECGKAFSVSSALIYHKRIHTGEKPYTCEECGKAFNCSSTLKTHKIIHTGEKPYTCEECGRTFNCSSTVKAHKRIHTGEKPYKCEECDKAFKWHSSLAKHKIIHTGEKPYKCK

SEQ ID NO: 16389 - protein, 536 aa, Homo Sapiens
MGPLQFRDVAIEFSLEEWHCLDTAQRNLYRNVMLENYRNLVFLGIVVSKPDLITCLEQGKKPLTMKKHEMVANPSVTCSHFARDLWPEQSIKDSFQKVTLRRYENYGHDNLQFKKGCESVDECKVHKRGYNGLNQYLTTTQSKIFQCDKYVKVIHKFSNSNRHKIRHTGKKPFKCIECGKAFNQSSTLTTHKKIHTGEKPFKCEECGKAFNWSSHLTTHKRIHTGEKRYKCEDCGKAFSRFSYLTAHKIIHSGEKPYKCEECGKAFKRSSNLTTHKIIHTGEKPYKCEECGKAFKRSSILTAHKIIHSGEKPYKCEECGKAFKHPSVLTTHKRIHTGEKPYKCEECGRAFKYFSSLTTHKIIHSGEKPYKCEECGKAFNWSSHLTTHKRIHTGEKPYKCEECGEAFKYSSSLTTHKIIHTGQQPFKCEECGKAFKCFSILTTHKRIHTGEKPYKCEECGKAFNSSSHLTAHKRIHTGEKPYKCERCGKAFKRSFILTRHKRIHTGEKPYKCEECGKGFKCPSTLTTHKVIHTGEKL

SEQ ID NO: 16390 - protein, 644 aa, Homo Sapiens
MEIPAPEPEKTALSSQDPALSLKENLEDISGWGLPEARSKESVSFKDVAVDFTQEEWGQLDSPQRALYRDVMLENYQNLLALGPPLHKPDVISHLERGEEPWSMQREVPRGPCPEWELKAVPSQQQGICKEEPAQEPIMERPLGGAQAWGRQAGALQRSQAAPWAPAPAMVWDVPVEEFPLRCPLFAQQRVPEGGPLLDTRKNVQATEGRTKAPARLCAGENASTPSEPEKFPQVRRQRGAGAGEGEFVCGECGKAFRQSSSLTLHRRWHSREKAYKCDECGKAFTWSTNLLEHRRIHTGEKPFFCGECGKAFSCHSSLNVHQRIHTGERPYKCSACEKAFSCSSLLSMHLRVHTGEKPYRCGECGKAFNQRTHLTRHHRIHTGEKPYQCGSCGKAFTCHSSLTVHEKIHSGDKPFKCSDCEKAFNSRSRLTLHQRTHTGEKPFKCADCGKGFSCHAYLLVHRRIHSGEKPFKCNECGKAFSSHAYLIVHRRIHTGEKPFDCSQCWKAFSCHSSLIVHQRIHTGEKPYKCSECGRAFSQNHCLIKHQKIHSGEKSFKCEKCGEMFNWSSHLTEHQRLHSEGKPLAIQFNKHLLSTYYVPGSLLGAGDAGLRDVDPIDALDVAKLLCVVPPRAGRNFSLGSKPRN

SEQ ID NO: 16391 - protein, 193 aa, Homo Sapiens
MAQASLLACEGLAGVSLVPTAASKKMMLSQIASKQAENGERAGSPDVLRCSSQGHRKDSDKSRSRKDDDSLSEASHSKKTVKKVVVVEQNGSFQVKIPKNFVCEHCFGAFRSSYHLKRHILIHTGEKPFECDICDMRFIQKYHLERHKRVHSGEKPYQCERCHQCFSRTDRLLRHKRMCQGCQSKTSDGQFSL

SEQ ID NO: 16392 - protein, 644 aa, Homo Sapiens
MAEAVAAPISPWTMAATIQAMERKIESQAARLLSLEGRTGMAEKKLADCEKTAVEFGNQLEGKWAVLGTLLQEYGLLQRRLENVENLLRNRNFWILRLPPGSKGESPKEWGKLEDWQKELYKHVMRGNYETLVSLDYAISKPEVLSQIEQGKEPCNWRRPGPKIPDVPVDPSPGSGPPVPAPDLLMQIKQEGELQLQEQQALGVEAWAAGQPDIGEEPWGLSQLDSGAGDISTDATSGVHSNFSTTIPPTSWQTDLPPHHPSSACSDGTLKLNTAASTEDVKIVIKTEVQEEEVVATPVHPTDLEAHGTLFGPGQATRFFPSPAQEGAWESQGSSFPSQDPVLGLREPARPERDMGELSPAVAQEETPPGDWLFGGVRWGWNFRCKPPVGLNPRTGPEGLPYSSPDNGEAILDPSQAPRPFNEPCKYPGRTKGFGHKPGLKKHPAAPPGGRPFTCATCGKSFQLQVSLSAHQRSCGAPDGSGPGTGGGGSGSGGGGGGSGGGSARDGSALRCGECGRCFTRPAHLIRHRMLHTGERPFPCTECEKRFTERSKLIDHYRTHTGVRPFTCTVCGKSFIRKDHLRKHQRNHAAGAKTPARGQPLPTPPAPPDPFKSPASKGPLASTDLVTDWTCGLSVLGPTDGGDM

SEQ ID NO: 16393 - protein, 191 aa, Homo Sapiens
MTDPSLGLTVPMAPPLAPLPPRDPNGAGSEWRKPGAVSFADVAVYFSREEWGCLRPAQRALYRDVMRETYGHLGALGESPTCLPGPCASTGPAAPLGAACGVGGPGAGQAASSQRGVCVLLPQESEAASRRSSPGWRRRPNCGIRLPRIRRWRSVRQKRTQQIPETRKRKDKGKGREPWRSPTLWPPGLLG

SEQ ID NO: 16394 - protein, 778 aa, Homo Sapiens
MNLTEDCMVFEDVAIYFSQEEWGILNDAQRHLHSNVMLENFALLSSVGCWHGAKDEEVPSKQCVSVRVLQVTIPKPALSTLKAQPCKMCSSILKDILHLAEHDGTHPEQGLYTCAAEHDLHQKEQIREKLTRSDEWRPSFVNHSAHVGERNFTCTQGGKDFTASSDLLQQQVLNSGWKLYRDTQDGEAFQGEQNDFNSSQGGKDFCHQHGLFEHQKTHNGERPYEFSECGELFRYNSNLIKYQQNHAGERPYEGTEYGKTFIRKSNLVQHQKIHSEGFLSKRSDPIEHQEILSRPTPYECTQCGKAFLTQAHLVGHQKTHTGEQPYECNKCGKFFMYNSKLIRHQKVHTGERRYECSECGKLFMDSFTLGRHQRVHTGERPFECSICGKFFSHRSTLNMHQRVHAGKRLYKCSECGKAFSLKHNVVQHLKIHTGERPYECTECEKAFVRKSHLVQHQKIHTDAFSKRSDLIQHKRIDIRPRPYTCSECGKAFLTQAHLVGHQKIHTGERPYECTQCAKAFVRKSHLVQHEKIHTDAFSKRSDLIQHKRIDLRPRPYVCSECGKAFLTQAHLDGHQKIQTGERRYECNECGKFFLDSYKLVIHQRIHTGEKPYKCSKCGKFFRYRCTLSRHQKVHTGERPYECSECGKFFRDSYKLIIHQRVHTGEKPYECSNCGKFLRYRSTFIKHHKVCTGEKPHECSKCRELFRTKSSLIIHQQSHTGESPFKLRECGKDFNKCNTGQRQKTHTGERSYECGESSKVFKYNSSLIKHQIIHTGKRP

SEQ ID NO: 16395 - protein, 723 aa, Homo Sapiens
MSLLKERKPKKPHYIPRPPGKPFKYKCFQCPFTCNEKSHLFNHMKYGLCKNSITLVSEQDRVPKCPKSNSLDPKQTNQPDATAKPASSKSVANGLSAFDSKLQHSSAREDIKENLELQARGTHRCLGQKPALHRASPCKSPAPEAALGAQPALEGAARPSAFVPVGEHRLKGPDNAEAPETLALHNPTAKAVSFHTKSAFHTPGYPWKAGSPFLPPEFPHKISSTKGLGAISPYMHPTIPEYPPHFYTEHGLATIYSPYLLAGSSPECDAPLLSVYGTQDPRHFLPHPGPIPKHLAPSPATYDHYRFFQQYPSNLPIPYGFYRPESAFSSYGLRLPPVTGLTRDQSSHLLEEATLVYPASSPSRLNPSDPNRKHVEFESPIPEAKDSSKAGQRDTEGSKMSPRAGSAATGSPGRPSPTDFMQTSQTCEGLYDLSNKAASSALGRLYPPEQSLTAFRPVKKSTECLPAQAAETTAESPVSLNVVNGDPPAPTGSASLVSEAAPSSPDDSSGMGPLNLSKKSEINLAATHEPTYQGSPQAETASFSELQDLPLNLSVKDPCNTQAPRPAFPGRPRAAEPAAAVPQKTGTEGSEDGPSHPETKPGSLDGDGAPPTGPGEEAPDACAVDSSEEQKQTAAVALCQLAAYSPRNIRVGDGDAAAPEPACRQDTPTLSSMESQEAQCDLRPKGQKRTSLRDAGKSQQGAKKAKLQDTARVFTLRRRARVS

SEQ ID NO: 16396 - protein, 296 aa, Homo Sapiens
MYFSQEEWELLDPTQKALYNDVMQENYETVISLALFVLPKPKVISCLEQGEEPWVQVSPEFKDSAGKSPTGLKLKNDTENHQPVSLSDLEIQASAGVISKKAKVKVPQKTAGKENHFDMHRVGKWHQDFPVKKRKKLSTWKQELLKLMDRHKKDCAREKPFKCQECGKTFRVSSDLIKHQRIHTEEKPYKCQQCDKRFRWSSDLNKHLTTHQGIKPYKCSWCGKSFSQNTNLHTHQRTHTGEKPFTCHECGKKFSQNSHLIKHRRTHTGEQPYTCSICRRNFSRRSSLLRHQKLHL

SEQ ID NO: 16397 - protein, 510 aa, Homo Sapiens
MAMRELNADSCSSPQMGAMWETSGSVKENSSQSKKYSTKIENLGPESACRHFWSFRYHEATGPLETISQLQKLCHQWLRPEIHSKEQILEMLVLEQFLSILPKETQNWVQKHHPQNVKQALVLVEFLQREPDGTKNEVTAHELGKEAVLLGGTAVAPGFKWKPAEPQPMGVFQKEYWNTYRVLQEQLGWNTHKETQPVYERAVHDQQMLALSEQKRIKHWKMASKLILPESLSLLTFEDVAVYFSEEEWQLLNPLEKTLYNDVMQDIYETVISLGLKLKNDTGNDHPISVSTSEIQTSGCEVSKKTRMKIAQKTMGRENPGDTHSVQKWHRAFPRKKRKKPATCKQELPKLMDLHGKGPTGEKPFKCQECGKSFRVSSDLIKHHRIHTGEKPYKCQQCDRRFRWSSDLNKHFMTHQGIKPYRCSWCGKSFSHNTNLHTHQRIHTGEKPFKCDECGKRFIQNSHLIKHQRTHTGEQPYTCSLCKRNFSRRSSLLRHQKLHRRREACLVSPN

SEQ ID NO: 16398 - protein, 570 aa, Homo Sapiens
MESLGLHTVTLSDGTTAYVQQAVKGEKLLEGQVIQLEDGTTAYIHQVTVQKEALSFEDGQPVQLEDGSMAYIHRTPREGYDPSTLEAVQLEDGSTAYIHHPVAVPSESTILAVQTEVGLEDLAAEDDEGFSADAVVALEQYASKVLHDSQIPRNGKGQQVGDRAFRCGYKGCGRLYTTAHHLKVHERAHTGDRPYRCDFPSCGKAFATGYGLKSHVRTHTGEKPYKCPEELCSKAFKTSGDLQKHVRTHTGERPFQCPFEGCGRSFTTSNIRKVHVRTHTGERPYTCPEPHCGRGFTSATNYKNHVRIHTGEKPYVCTVPGCGKRFTEYSSLYKHHVVHTHCKPYTCSTCGKTYRQTSTLAMHKRSAHGELEATEESEQALYEQQQLEAASAAEESPPPKRPRIAYLSEVKEERDDIPAQVAMVTEEDGAPQVALITQDGAQQVSLSPEDLQALGSAISMVTQHGSTTLTIPSPDADLATSGTHTVTMVSADGTQTQPVTIITSGAVVAEDSSVASLRHQQVALLATANGTHIAVQLEEQQTLEEAINVATAAMQQGAVTLETTVSESGC

SEQ ID NO: 16399 - protein, 746 aa, Homo Sapiens
MAFSQGLLTFRDVAIEFSQEEWKCLDPAQRTLYRDVMLENYRNLVSLDISSKCTMKEFLSTAQGNREVFHAGTLQIHESHHNGDFCYQDVDKDIHDYEFQWQEDERNGHEAPMTKIKKLTGITERYDQSHARNKPIKDQLGSSFHSHLPEMHIFQTEEKIDNQVVKSVHDASLVSTAQRISCRPKTHISNNHGNNFWNSSLLTQKQEVHMREKSFQCNESGKAFNYSSLLRKHQIIHLADKYKCDVCGKLFNQKRNLACHRRCHTGENPYKCNECGKTFSQTSSLTCHRRLHTGEKPYKCEECDKAFHFKSILERHRIIHTEEKPYKCNECGKTFRQKSILTRHHRLHTGEKPYKCNECGKTFSHKSSLTCHHRLHTGEKPYKCNECGKTFSHKSSLTCHRRLHTGEKPYKCEECDKAYSFRSNFEIHRKIHTEDNAYKCNECGKTFSRTSSLTCHRRRHTGEQPYKCEECDKAFRFKSNLERHRRIHTGEKPYKCNECGKTFSRKSYLTCHHRLHTGEKAYKCNECGKTFSWKSSLTCHRRLHSGEKPYKCKECGKTFNQQLTLKRHRRLHSGENPYKCEDSDKAYSFKSNLEIHQKIHTEENPYKCNECGKTFSRTSSLTCHRRLHTGEKPYKCEECDKAFRVKSNLEGHRRIHTGEKPYKCNECGKTFSRKSYFICHHRLHTGEKPYKCNECGKNFSQKSSLICHHRLHTGEKPYKCNECGKTFSQKSNLTCHRRLHTGEKQV

SEQ ID NO: 16400 - protein, 394 aa, Homo Sapiens
MDPVACEDVAVNFTQEEWALLDISQRKLYREVMLETFRNLTSIGKKWKDQNIEYEYQNPRRNFRSLIEGNVNEIKEDSHCGETFTQVPDDRLNFQEKKASPEAKSCDNFVCGEVGIGNSSFNMNIRGDIGHKAYEYQDYAPKPYKCQQPKKAFRYHPSFRTQERNHTGEKPYACKECGKTFISHSGIRRRMVMHSGDGPYKCKFCGKAVHCLRLYLIHERTHTGEKPYECKQCVKSFSYSATHRIHERTHTGEKPYECQQCGKAFHSSSSFQAHKRTHTGGKPYECKQCGKSFSWCHSFQIHERTHTGEKPCECSKCNKAFRSYRSYLRHKRSHTGEKPYQCKECRKAFTYPSSLRRHERTHSAKKPYECKQCGKALSYKFSNTPKNALWRKTL

SEQ ID NO: 16401 - protein, 408 aa, Homo Sapiens
MAPPLAPLPPRDPNGAGPEWREPGAVSFADVAVYFCREEWGCLRPAQRALYRDVMRETYGHLSALGIGGNKPALISWVEEEAELWGPAAQDPEVAKCQTQTDPADSRNKKKERQREGTGALEKPDPVAAGSPGLKSPQAPSAGPPYGWEQLSKAPHRGRPSLCAHPPVPRADQRHGCYVCGKSFAWRSTLVEHVYSHTGEKPFHCTDCGKGFGHASSLSKHRAIHRGERPHRCLECGRAFTQRSALTSHLRVHTGEKPYGCADCGRRFSQSSALYQHRRVHSGETPFPCPDCGRAFAYPSDLRRHVRTHTGEKPYPCPDCGRCFRQSSEMAAHRRTHSGEKPYPCPQCGRRFGQKSAVAKHQWVHRPGAGGHRGRVAGRLSVTLTPGHGDLDPPVGFQLYPEIFQECG

SEQ ID NO: 16402 - protein, 523 aa, Homo Sapiens
MALPQGLLTFRDVAIEFSQEEWKCLDPAQRTLYRDVMLENYRNLVSLDISSKCMMKEFSSTAQGNREVFHAGTSQRHESHHNGDFCFQDIDKDIHDIEFQWQEDERNGHEALMTKIKKLTGSTERYDQNYAGNKPVKYQLGFSFHSHLPELHIFHTEEKIDNQVVKSIHDASLVSTAQRISCRPETHISNDYGNNFLNSSLFTQKQEVHMREKSFQCNDSGKAYNCSSLLRKHQLIHLGEKQYKCDICGKVFNSKRYVARHRRCHTGEKPYKCNECGKTFSQTYYLTCHRRLHTGEKPYKCEECDKAFHFKSKLQIHRRIHTGEKPYKCNECGKTFSQKSYLTCHRRLHTGEKPYKCNECGKTFSRKSHFTCHHRVHTGEKPYKCNECSKTFSHKSSLTYHRRLHTEEKPYKCNECGKTFNQQLTLNICRLHSGEKPYKCEECDKAYSFKSNLEIHQKIHTEENPYKCNECGKTFSRTSSLTYHHRLHTGQKPYKCEDCDEAFSFKSNLERHRRIYTGEKLHV

SEQ ID NO: 16403 - protein, 468 aa, Homo Sapiens
MAQLRRGHLTFRDVAIEFSQEEWKCLDPVQKALYRDVMLENYRNLVSLGICLPDLSIISMMKQRTEPWTVENEMKVAKNPDRWEGIKDINTGRSCAVRSKAGNKPITNQLGLTFQLPLPELEIFQGEGKIYECNQVQKFISHSSSVSPLQRIYSGVKTHIFNKHRNDFVDFPLLSQEQKAHIRRKPYECNEQGKVFRVSSSLPNHQVIHTADKPNRCHECGKTVRDKSGLAEHWRIRTGEKPYKCKECGKLFNRIAYLARHEKVHTGESPYKCNECGKVFSRITYLVRHQKIHTREKPHKCNKCGKVYSSSSYLAQHWRIHTGEKLYKCNKCGKEFSGHSSLTTHLLIHTGEKPYKCKECDKAFRHKFSLTVHQRNHNGEKPYKCHECGKVFTQVSHLARHQKIHTGEKPYKCNECGKVFTQNSHLANHQRIHTGEKPYKCHVCGKVFRHSSWFVQHQRSVHERVLTN

SEQ ID NO: 16404 - protein, 540 aa, Homo Sapiens
MEREALPWGLEPQDVQSSDEMRSPEGYLRGNMSENEEEEISQQEGSGDYEVEEIPFGLEPQSPGFEPQSPEFEPQSPRFEPESPGFESRSPGLVPPSPEFAPRSPESDSQSPEFESQSPRYEPQSPGYEPRSPGYEPRSPGYESESSRYESQNTELKTQSPEFEAQSSKFQEGAEMLLNPEEKSPLNISVGVHPLDSFTQGFGEQPTGDLPIGPPFEMPTGALLSTPQFEMLQNPLGLTGALRGPGRRGGRARGGQGPRPNICGICGKSFGRGSTLIQHQRIHTGEKPYKCEVCSKAFSQSSDLIKHQRTHTGERPYKCPRCGKAFADSSYLLRHQRTHSGQKPYKCPHCGKAFGDSSYLLRHQRTHSHERPYSCTECGKCYSQNSSLRSHQRVHTGQRPFSCGICGKSFSQRSALIPHARSHAREKPFKCPECGKRFGQSSVLAIHARTHLPGRTYSCPDCGKTFNRSSTLIQHQRSHTGERPYRCAVCGKGFCRSSTLLQHHRVHSGERPYKCDDCGKAFSQSSDLIRHQRTHAAGRR

SEQ ID NO: 16405 - protein, 545 aa, Homo Sapiens
MDCVIFEEVAVNFTPEEWALLDHAQRSLYRDVMLETCRNLASLDCYIYVRTSGSSSQRDVFGNGISNDEEIVKFTGSDSWSIFGENWRFDNTGDQHQIPQRHLRSQLGRLCESNEGHQCGETLSQTANLLVHKSYPTEAKPSECTKCGKAFENRQRSHTGQRPCKECGQACSCLSCQSPPMKTQTVEKPCNCQDSRTASVTYVKSLSSKKSYECQKCGKAFICPSSFRGHVNSHHGQKTHACKVCGKTFMYYSYLTRHVRTHTGEKPYECKECGKAFSCPSYFREHVRTHTGEKPYECKHCGKSFSCYSSFRDHVRTHTGEKPCQCKHCGKAFTCYSSLREHGRTHSGEKPYECKECGKAFRYPSSLRAHMRMHTGEKPYVCKQCGKAFGCPTYFRRHVKTHSGVKPYQCKECGKAYSFSSSLRIHVRTHTGEKPFECKHCGKAFSCHSSLREHVRTHSGEKPYECNQCGKAFSHAQYFQKHVRSHSGVKPYECTECGKAYSCSSSLRVHVRTHTGERPYECKQCGKTFRYLASLQAHVRTHAGA

SEQ ID NO: 16406 - protein, 691 aa, Homo Sapiens
MMAENNLKMLKIQQCVVANKLPRNRPYVCNICFKHFETPSKLARHYLIHTGQKPFECDVCHKTFRQLVHLERHQLTHSLPFKCSICQRHFKNLKTFVKHQQLHNETYQNNVKQVRRLLEAKQEKSMYGVYNTFTTEERWALHPCSKSDPMYSMKRRKNIHACTICGKMFPSQSKLDRHVLIHTGQRPFKCVLCTKSFRQSTHLKIHQLTHSEERPFQCCFCQKGFKIQSKLLKHKQIHTRNKAFRALLLKKRRTESRPLPNKLNANQGGFENGEIGESEENNPLDVHSIYIVPFQCPKCEKCFESEQILNEHSCFAARSGKIPSRFKRSYNYKTIVKKILAKLKRARSKKLDNFQSEKKVFKKSFLRNCDLISGEQSSEQTQRTFVGSLGKHGTYKTIGNRKKKTLTLPFSWQNMGKNLKGILTTENILSIDNSVNKKDLSICGSSGEEFFNNCEVLQCGFSVPRENIRTRHKICPCDKCEKVFPSISKLKRHYLIHTGQRPFGCNICGKSFRQSAHLKRHEQTHNEKSPYASLCQVEFGNFNNLSNHSGNNVNYNASQQCQAPGVQKYEVSESDQMSGVKAESQDFIPGSTGQPCLPNVLLESEQSNPFCSYSEHQEKNDVFLYRCSVCAKSFRSPSKLERHYLIHAGQKPFECSVCGKTFRQAPHWKRHQLTHFKERPQGKVVALDSVM

SEQ ID NO: 16407 - protein, 317 aa, Homo Sapiens
MPGEQQAEEEEEEEMQEEMVLLVKGEEDEGEEKYEVVKLKIPMDNKEVPGEAPAPSADPARPHACPDCGRAFARRSTLAKHARTHTGERPFGCTECGRRFSQKSALTKHGRTHTGERPYECPECDKRFSAASNLRQHRRRHTGEKPYACAHCGRRFAQSSNYAQHLRVHTGEKPYACPDCGRAFGGSSCLARHRRTHTGERPYACADCGTRFAQSSALAKHRRVHTGEKPHRCAVCGRRFGHRSNLAEHARTHTGERPYPCAECGRRFRLSSHFIRHRRAHMRRRLYICAGCGRDFKLPPGATAATATERCPECEGS

SEQ ID NO: 16408 - protein, 489 aa, Homo Sapiens
MAAAEPMGPAQVPMNSEVIVDPIQGQVNFEDVFVYFSQEEWVLLDEAQRLLYRDVMLENFALMASLGHTSFMSHIVASLVMGSEPWVPDWVDMTLAVATETPGGSDPGCWHGMEDEEIPFEQSFSIGMSQIRIPKGGPSTQKAYPCGTCGLVLKDILHLAEHQETHPGQKPYMCVLCGKQFCFSANLHQHQKQHSGEKPFRSDKSRPFLLNNCAVQSMEMSFVTGEACKDFLASSSIFEHHAPHNEWKPHSNTKCEEASHCGKRHYKCSECGKTFSRKDSLVQHQRVHTGERPYECGECGKTFSRKPILAQHQRIHTGEMPYECGICGKVFNHSSNLIVHQRVHTGARPYKCSECGKAYSHKSTLVQHESIHTGERPYECSECGKYFGHKYRLIKHWSVHTGARPYECIACGKFFSQSSDLIAHQRVHNGEKPYVCSECGKAFSHKHVLVQHHRIHTGERPYKCSECGKAFRQRASLIRHWKIHTGERP

SEQ ID NO: 16409 - protein, 442 aa, Homo Sapiens
MAAATLRDPAQQGYVTFEDVAVYFSQEEWRLLDDAQRLLYRNVMLENFTLLASLGLASSKTHEITQLESWEEPFMPAWEVVTSAILRGSWQGAKAEAAAEQSASVEVPSSNVQQHQKQHCGEKPLKRQEGRVPVLRSCRVHLSEKSLQSREVGKDLLTSSGVLKHQVTHTGEKSHRSSKSREAFHAGKRHYKCSECGKAFGQKYLLVQHQRLHTGEKPYECSECGKLFSHKSNLFIHQIVHTGERPYGCSDCGKSFSRNADLIQHQRVHTGEKPFTCSECGKAFRHNSTLVQHHRIHTGVRPYECSECGKLFSFNSSLMKHQRVHTGERPYKCSECGKFYSHKSSLINHWRVHTGERPYECSECGKFFSQSSSLMQHRKVHTGEKPFKCNECGRFFSENSSLVKHQRVHTGAKPYECRECGKFFRHSSSLVKHRRIHTGEIQ

SEQ ID NO: 16410 - protein, 483 aa, Homo Sapiens
MWLGTSGKSGLPGHCLENPLQECHPAQLEEWALKGISRPSVISQPEQKEEPWVLPLQNFEARKIPRESHTDCEHQVAKLNQDNSETAEQCGTSSERTNKDLSHTLSWGGNWEQGLELEGQHGTLPGEGQLESFSQERDLNKLLDGYVGEKPMCAECGKSFNQSSYLIRHLRTHTGERPYTCIECGKGFKQSSDLVTHRRTHTGEKPYQCKGCEKKFSDSSTLIKHQRTHTGERPYECPECGKTFGRKPHLIMHQRTHTGEKPYACLECHKSFSRSSNFITHQRTHTGVKPYRCNDCGESFSQSSDLIKHQRTHTGERPFKCPECGKGFRDSSHFVAHMSTHSGERPFSCPDCHKSFSQSSHLVTHQRTHTGERPFKCENCGKGFADSSALIKHQRIHTGERPYKCGECGKSFNQSSHFITHQRIHLGDRPYRCPECGKTFNQRSHFLTHQRTHTGEKPFHCSKCNKSFRQKAHLLCHQNTHLI

SEQ ID NO: 16411 - protein, 537 aa, Homo Sapiens
MESGLAGNGTGAGLVMKVKQEKPERLLQTLAPQAMLVEKDKENIFQQHRGLPPRQTMGRPRALGGQEESGSPRWAPPTEQDAGLAGRAPGSASGPLSPSLSSGEGHFVCLDCGKRFSWWSSLKIHQRTHTGEKPYLCGKCGKSFSQKPNLARHQRHHTGERPFCCPECARRFSQKQHLLKHQKTHSRPATHSCPECERCFRHQVGLRIHQRAHARDRQGSRAGLHELIQDAAARRACRLQPGPPRGRPEWAWLGLCQGWWGQPGARAAVSGPEGPGEPRQFICNECGKSFTWWSSLNIHQRIHTGERPYACPECGRRFSQKPNLTRHLRNHTGERPHPCPHCGRGFRQKQHLLKHLRTHLPGAQAAPCPSCGKSCRSRAALRAHQRAHAVAEPAVPAGEPGDQPQAEAIPGLAARPRSSQRSPGARDTLWGRGQAGLAGPGEPRQFICNECGKSFSWWSALTIHQRIHTGERPYPCPECGRRFSQKPNLTRHRRNHTGERPYLCPACGRGFSQKQHLLKHQRVHRAAPACSPKEEAR

SEQ ID NO: 16412 - protein, 518 aa, Homo Sapiens
MAAAALRPPAQGTVTFEDVAVNFSQEEWSLLSEAQRCLYHDVMLENLTLISSLGCWYGAKDETPSKQTLSIQQESPLRTHWTGVCTKKVHLWGMCGPLLGDILHQGTQHNQKLNGFGAYEKKLDDDANHHQDQKQHIGEKSYRSNAKGTSFVKNCKFHMSHEPFIFHEVGKDFLSSLRLLQQEDIHTSGKSNFETKHGIPLQGGKTHYICGESTIPFSNKHSLVLHQRLLPREGPYVCSDSGKFTSKSNSFNNHQGVRTGKRPYQCGQCDESFWYKAHLTEHQRVHTGERPYECGECDKSFSHKHSLVDHQRVHTGERPYECDECGKSFSHKRSLVHHQRVHTGERPYQCGECGKSFNHKCNLIQHQRVHTGERPFECTACGKLFRSNSHLKEHQRVHTGERPYECKECRKSFRYKSHLTEHQRVHTGERPYECRECGKCFHQKGSLIQHQQIHSGERPHECGECGKCFHQKGSLIRHQQIHSGERPHECGECGKCFRQKGNLIKHQRVHTGERHHEC

SEQ ID NO: 16413 - protein, 760 aa, Homo Sapiens
MENQRSSPLSFPSVPQEETLRQAPAGLPRETLFQSRVLPPKEIPSLSPTIPRQGSLPQTSSAPKQETSGRMPHVLQKGPSLLCSAASEQETSLQGPLASQEGTQYPPPAAAEQEVSLLSHSPHHQEAPVHSPEAPEKDPLTLSPTVPETDMDPLLQSPVSQKDTPFQISSAVQKEQPLPTAEITRLAVWAAVQAVERKLEAQAMRLLTLEGRTGTNEKKIADCEKTAVEFANHLESKWVVLGTLLQEYGLLQRRLENMENLLKNRNFWILRLPPGSNGEVPKVPVTFDDVAVHFSEQEWGNLSEWQKELYKNVMRGNYESLVSMDYAISKPDLMSQMERGERPTMQEQEDSEEGETPTDPSAAHDGIVIKIEVQTNDEGSESLETPEPLMGQVEEHGFQDSELGDPCGEQPDLDMQEPENTLEESTEGSSEFSELKQMLVQQRNCTEGIVIKTEEQDEEEEEEEEDELPQHLQSLGQLSGRYEASMYQTPLPGEMSPEGEESPPPLQLGNPAVKRLAPSVHGERHLSENRGASSQQQRNRRGERPFTCMECGKSFRLKINLIIHQRNHIKEGPYECAECEISFRHKQQLTLHQRIHRVRGGCVSPERGPTFNPKHALKPRPKSPSSGSGGGGPKPYKCPECDSSFSHKSSLTKHQITHTGERPYTCPECKKSFRLHISLVIHQRVHAGKHEVSFICSLCGKSFSRPSHLLRHQRTHTGERPFKCPECEKSFSEKSKLTNHCRVHSRERPPPRWSSSFCSL

SEQ ID NO: 16414 - protein, 729 aa, Homo Sapiens
MAAPDLAHGGHVSRDSVCLHEEQTQAAGMVAGWLINCYQDAVTFDDVAVDFTQEEWTLLDPSQRDLYRDVMLENYENLASVEWRLKTKGPALRQDRSWFRASNETQTARSHNGGQLCDRTQCGEAFSEHSGLSTHVRTQNTGDSCVSNHYERDFFIPCQKTLFKIGEQFSVLGQCGKAFSSTPNVVSQQACTRDRSLDYSSCGEVFLNQSYLQARAGSHNGEETWKWKPCGKALTHSMGCATPVEMHAVRNPHVCRECGKAFRYTAYLTGRVQVHPGEKPCELEECGKASPVSSSLTQHVRIHAAEKPCECKECGKAFTGLSGLSKHVQTDPGQKPYECKDCGKACGGFYLLNEHGKTHTREKPFACVVCGKYFRNSSCLNNHVRIHTGIKPYTCSYCGKAFTVRCGLTRHVRTHTGEKPYTCKDCGKAFCTSSGLTEHVRTHTGEKPYECKDCGKSFTVSSSLTEHARIHTGEKPYECKQCGKAFTGRSGLTKHMRTHTGEKPYECKDCGKAYNRVYLLNEHVKTHTEEKPFICTVCRKSFRNSSCLNKHIQIHTGIKPYECKDCGKTFTVSSSLTEHIRTHTGEKPYECKVCGKAFTTSSHLIVHIRTHTGEKPYICKECGKAFASSSHLIEHRRTHTGEKPYICNECGKAFRASSHLHKHGRIHTGQKPYKCKECGKAYNRFYLLKEHLKTYTEEQVFVCKDCGKSFKNSSCLNHHTQIHTDEKPF

SEQ ID NO: 16415 - protein, 641 aa, Homo Sapiens
MVHGSVTFRDVAIDFSQEEWECLQPDQRTLYRDVMLENYSHLISLGSSISKPDVITLLEQEKEPWMVVRKETSRRYPDLELKYGPEKVSPENDTSEVNLPKQVIKQISTTLGIEAFYFRNDSEYRQFEGLQGYQEGNINQKMISYEKLPTHTPHASLICNTHKPYECKECGKYFSRSANLIQHQSIHTGEKPFECKECGKAFRLHIQFTRHQKFHTGEKPFECNECGKAFSLLTLLNRHKNIHTGEKLFECKECGKSFNRSSNLVQHQSIHSGVKPYECKECGKGFNRGAHLIQHQKIHSNEKPFVCKECGMAFRYHYQLIEHCQIHTGEKPFECKECGKAFTLLTKLVRHQKIHTGEKPFECRECGKAFSLLNQLNRHKNIHTGEKPFECKECGKSFNRSSNLVQHQSIHAGIKPYECKECGKGFNRGAHLIQHQKIHSNEKPFVCRECEMAFRYHCQLIEHSRIHTGDKPFECQDCGKAFNRGSSLVQHQSIHTGEKPYECKECGKAFRLYLQLSQHQKTHTGEKPFECKECGKFFRRGSNLNQHRSIHTGKKPFECKECGKAFRLHMHLIRHQKLHTGEKPFECKECGKAFRLHMQLIRHQKLHTGEKPFECKECGKVFSLPTQLNRHKNIHTGEKAS

SEQ ID NO: 16416 - protein, 833 aa, Homo Sapiens
MVHGSVTFRDVAIDFSQEEWECLQPDQRTLYRDVMLENYSHLISLGSSISKPDVITLLEQEKEPWIVVSKETSRWYPDLESKYGPEKISPENDIFEINLPKHVIKQISKTLGLEAFYFRNDSEYRSRFEGRQGHQEGYINQKIISYEEMPAYTHASPIHNTHKPYECKECGKYFSCGSNLIQHQSIHTGEKPYKCKECGKAFQLHIQLTRHQKFHTGEKTFECKECGKAFNLPTQLNRHKNIHTVKKLFECKECGKSFNRSSNLTQHQSIHAGVKPYQCKECGKAFNRGSNLIQHQKIHSNEKPFVCRECEMAFRYHYQLIEHCRIHTGEKPFECKECRKAFTLLTKLVRHQKIHMGEKPFECRECGKAFSLLNQLNRHKNIHTGEKPFECKECGKSFNRSSNLIQHQSIHADVKPYECKECGKGFNRGANLIQHQKIHSNEKPFVCRECEMAFRYHYQLIQHCQIHTGGKPFECKECGKAFSLLTQLARHKNIHTGEKPFECKDCGKAFNRGSNLVQHQSIHTGEKPYECKECGKAFRLHLQLSQHEKTHTGEKPFECKECGKFFRRGSNLNQHRSIHTGKKPFECKECGKAFRLHMHLIRHQKFHTGEKPFECKECGKAFSLHTQLNHHKNIHTGEKPFKCKECGKSFNRVSNLVQHQSIHAGVKPYECKECGKGFSRVSNLIQHQKTHSSAKPFVCKECRKTFRYHYQLTEHYRIHTGEKPFECKECGKAFGLLTQLAQHQIIHTGEKPFKCKECGKAFNRGSNLVQPQSIHTGEKPYECKECGKAFRLHLQLSLHQKLVQVRNPLNVRNVGQPSDISSNLLNIRKFILG

SEQ ID NO: 16417 - protein, 355 aa, Homo Sapiens
MQRNAMYLKNVAETACNFQLTQYQISHANQKPYECQICGKPFRKRAHLTQHNRIHTGGKPYECKECGKVFICCSTLIQHKRTHTSEKPYECLECRKTFRRSAHLIRHQRIHTGEKPYKCKQCWKAFASVSDLIDIGKFTLMRDFTNVQNVGRHLTIAQLLFSIREFTLVRSPLNVRNVAKHSIIAQHLLNTRELILMRNLMNVRNVKRLLGKVHILLNIKEFILVRNHMSVSNVGRLSLVFLILIDIREFTLVKNPMNVKNVVELLTIVQLLFNTREFTLVRRLMNISSVGRFLSPVQHLFNIREHILMKNLMNVSNARRPSSIMHILFDIKEFILVRNLINVSNVGRPLLLFLI

SEQ ID NO: 16418 - protein, 699 aa, Homo Sapiens
MNTFQASVSFQDVTVEFSQEEWQHMGPVERTLYRDVMLENYSHLVSVGYCFTKPELIFTLEQGEDPWLLEKEKGFLSRNSPEDSQPDEISEKSPENQGKHLLQVLFTNKLLTTEQEISGKPHNRDINIFRARMMPCKCDIAGSACQGLSLMAPHCQYSKEKAHERNVCDKWLISIKDGRTNTQEKSFAYSKIVKTLHHKEEVIQHQTIQTLGQDFEYNESRKAFLEKAALVTSNSTHPKGKSYNFNKFGENKYDKSTFIIPQNMNPEKSHYEFNDTGNCFCRITHKTLTGGKSFSQKSHIREHHRVHIGVKPFEYGKSFNRNSTLPVHQRTHATDKYSDYHPCTETFSYQSTFSVHQKVHIRAKPYEYNECGKSCSMNSHLIWPQKSHTGEKPYECPECGKAFSEKSRLRKHQRTHTGEKPYKCDGCDKAFSAKSGLRIHQRTHTGEKPFECHECGKSFNYKSILIVHQRTHTGEKPFECNECGKSFSHMSGLRNHRRTHTGERPYKCDECGKAFKLKSGLRKHHRTHTGEKPYKCNQCGKAFGQKSQLRGHHRIHTGEKPYKCNHCGEAFSQKSNLRVHHRTHTGEKPYQCEECGKTFRQKSNLRGHQRTHTGEKPYECNECGKAFSEKSVLRKHQRTHTGEKPYNCNQCGEAFSQKSNLRVHQRTHTGEKPYKCDKCGRTFSQKSSLREHQKAHPGD

SEQ ID NO: 16419 - protein, 281 aa, Homo Sapiens
MAEAAPARDPETDKHTEDQSPSTPLPQPAAEKNSYLYSTEITLWTVVAAIQALEKKVDSCLTRLLTLEGRTGTAEKKLADCEKTAVEFGNQLEGKWAVLGTLLQEYGLLQRRLENVENLLRNRNFWILRLPPGSKGEAPKVPVTFDDVAVYFSELEWGKLEDWQKELYKHVMRGNYETLVSLDYAISKPDILTRIERGEEPCLDRWGQEKGNEVEVGRPRMMGTGLPPYPEHLTSPLSPAQEELKEGQAPKQQQDSEARVAPAGPEAGLALRTDLQGEAQI

SEQ ID NO: 16420 - protein, 323 aa, Homo Sapiens
MAAARPEAQSRSSPTPESRSQEPLDLVLVPDDCRPGTPPSDLIEIQVVKVTDTTLVPEPPEPGSFHCALCPAAFRLVSELLFHEHGHLAGAEGGGQGGDPSRCHVCGHSCPGPASLRAHYSLHTGERPYRCALCPRAFKALAPLLRHQHRHGVEPGTSRRPPDTAAVAEQRPGVAPERAEVVMAAAAAGAAVGKPFACRFCAKPFRRSSDMRDHERVHTGERPYHCGICGKGFTQSSVLSGHARIHTGERPFRCTLCDRTFNNSSNFRKHQRTHFHGPGPGLGDSGGQLGSSAAEGSGSGCGVGDPAEEGRGETAKVKVEADQ

SEQ ID NO: 16421 - protein, 405 aa, Homo Sapiens
MGPPLAPRPAHVPGEAGPRRTRESRPGAVSFADVAVYFSPEEWECLRPAQRALYRDVMRETFGHLGALGFSVPKPAFISWVEGEVEAWSPEAQDPDGESSAAFSRGQGQEAGSRDGNEEKERLKKCPKQKEVAHEVAVKEWWPSVACPEFCNPRQSPMNPWLKDTLTRRLPHSCPDCGRNFSYPSLLASHQRVHSGERPFSCGQCQARFSQRRYLLQHQFIHTGEKPYPCPDCGRRFRQRGSLAIHRRAHTGEKPYACSDCKSRFTYPYLLAIHQRKHTGEKPYSCPDCSLRFAYTSLLAIHRRIHTGEKPYPCPDCGRRFTYSSLLLSHRRIHSDSRPFPCVECGKGFKRKTALEAHRWIHRSCSERRAWQQAVVGRSEPIPVLGGKDPPVHFRHFPDIFQECG

SEQ ID NO: 16422 - protein, 782 aa, Homo Sapiens
MAEPPRLPLTFEDVAIYFSEQEWQDLEAWQKELYKHVMRSNYETLVSLDDGLPKPELISWIEHGGEPFRKWRESQKSGNIICSSVDMHFDPGFEEQLFWGSQQAMNSGKTKSHFQLDPESQCSFGSFVSFRPDQGITLGSPQRHDARAPPPLACGPSESTLKEGIPGPRNLDLPGLWDVPAWESTQHPWPVCGESCWENNHLVMHQRGHSKDRTRRAWEKFNKRAETQMPWSSPRVQRHFRCGVCGKSFRRKLCLLRHLAAHTGRGPFRNADGEMCFRHELTHPSHRLPQQGEKPAQCTPCGKRSLPVDSTQARRCQHSREGPASWREGRGASSSVHSGQKPGSRLPQEGNSHQEGDTEALQHGAEGPCSCSECGERSPMSARLASPCRAHTGEKPFQCAHCTKRFRLRRLLQVHQHAHGGERPFSCRKCGKGFAKQCKLTEHIRVHSGEKPFRCAKCGRNFRQRGQLLRHQRLHTDEKPFQCPECGLSFRLESMLRAHRLRHGGERPFSCSECGRGFTHQCKLREHLRVHSGERPFQCLKCDKRFRLKGILKAHQHTHSKERPFSCGECGKGFTRQSKLTEHLRVHSGERPFQCPECNRSFRLKGQLLSHQRLHTGERPFQCPECDKRYRVKADMKAHQLLHSGEMPFSCECGKGFVKHSKLIEHIRTHTGEKPFQCPKCDKSFRLKAQLLSHQGLHTGERPFHCPECDKNFRERGHMLRHQRIHRPERPFACGDCGKGFIYKSKLAEHIRVHTKSCPAPNELDIKKRLSQLFAMIEADWS

SEQ ID NO: 16423 - protein, 382 aa, Homo Sapiens
MELREEAWSPGPLDSEDQQMASHENPVDILIMDDDDVPSWPPTKLSPPQSAPPAGPPPRPRPPAPYICNECGKSFSHWSKLTRHQRTHTGERPNACADCGKTFSQSSHLVQHRRIHTGEKPYACLECGKRFSWSSNLMQHQRIHTGEKPYTCPDCGRSFTQSKSLAKHRRSHSGLKPFVCPRCGRGFSQPKSLARHLRLHPELSGPGVAAKVLAASVRRAKGPEEAVAADGEIAIPVGDGEGIIVVGAPGEGAAAAAAMAGAGAKAAGPRSRRAPAPKPYVCLECGKGFGHGAGLLAHQRAQHGDGLGAAGGEEPAHICVECGEGFVQGAALRRHKKIHAVGAPSVCSSCGQSYYRAGGEEEDDDDEAAGGRCPECRGGEGR

SEQ ID NO: 16424 - protein, 82 aa, Homo Sapiens
MRNMIPQDNENPPQQGEANQNDSVAFEDVAVNFTPDEWALLDPSQKNLYREVMQETLRNLASIEVLWKRDSLKVKVISMEKF

SEQ ID NO: 16425 - protein, 425 aa, Homo Sapiens
MFPPARGKELLSFEDVAMYFTREEWGHLNWGQKDLYRDVMLENYRNMVLLGFQFPKPEMICQLENWDEQWILDLPRTGNRKASGSACPGSEARHKMKKLTPKQKFSEDLESYKISVVMQESAEKLSEKLHKCKEFVDSCRLTFPTSGDEYSRGFLQNLNLIQDQNAQTRWKQGRYDEDGKPFNQRSLLLGHERILTRAKSYECSECGKVIRRKAWFDQHQRIHFLENPFECKVCGQAFRQRSALTVHKQCHLQNKPYRCHDCGKCFRQLAYLVEHKRIHTKEKPYKCSKCEKTFSQNSTLIRHQVIHSGEKRHKCLECGKAFGRHSTLLCHQQIHSKPNTHKCSECGQSFGRNVDLIQHQRIHTKEEFFQCGECGKTFSFKRNLFRHQVIHTGSQPYQCVICGKSFKWHTSFIKHQGTHKGQIST

SEQ ID NO: 16426 - protein, 498 aa, Homo Sapiens
MLEEGVLPSPGPALPQEENTGEEGMAAGLLTAGPRGSTFFSSVTVAFAQERWRCLVSTPRDRFKEGIPGKSRSLVLLGLPVSQPGMNSQLEQREGAWMLEGEDLRSPSPGWKIISGSPPEQALSEASFQDPCVEMPPGDSDHGTSDLEKSFNLRPVLSPQQRVPVEARPRKCETHTESFKNSEILKPHRAKPYACNECGKAFSYCSSLSQHQKSHTGEKPYECSECGKAFSQSSSLIQHQRIHTGEKPYKCSECGRAFSQNANLTKHQRTHTGEKPYRCSECEKAFSDCSALVQHQRIHTGEKPYECSDCGKAFRHSANLTNHQRTHTGEKPYKCSECGKAFSYCAAFIQHQRIHTGEKPYRCAACGKAFSQSANLTNHQRTHTGEKPYKCSECGKAFSQSTNLIIHQKTHTGEKPYKCNECGKFFSESSALIRHHIIHTGEKPYECNECGKAFNQSSSLSQHQRIHTGVKPYECSECGKAFRCSSAFVRHQRLHAGE

SEQ ID NO: 16427 - protein, 636 aa, Homo Sapiens
MAHLMMFRDVAVDFSQEEWECLDLEQRDLYRDVMLENYSNMVSLGFCIYQPEAFSLLEKGKEPWKILRDETRGPCPDMQSRCQTKKLLPKNGIFEREIAQLEIMRICKNHSLDCLCFRGDWEGNTQFQTLQDNQEECFKQVIRTCEKRPTFNQHTVFNLHQRLNTGDKLNEFKELGKAFISGSDHTQHQLIHTSEKFCGDKECGNTFLPDSEVIQYQTVHTVKKTYECKECGKSFSLRSSLTGHKRIHTGEKPFKCKDCGKAFRFHSQLSVHKRIHTGEKSYECKECGKAFSCGSDLTRHQRIHTGEKPYECNECRKAFSQRSHLIKHQRIHTGEKPYECKECGKAFTRGSHLTQHQRIHTGEKSHECKECGKAFIRGSNLAQHQNVHVGRKPYKCEKCGKAYIWSSHLARHQRIHTGRKPYECKQCGKTFTWASYLAQHEKIHNERKSYECKECGKTFLHGSEFNRHQKIHTGERNYECKECGKTFFRGSELNRHQKIHTGKRPYECEECGKAFLWGSQLTRHQRMHTGEEPYVCKECGKSFIWGSQLTRHKKIHTDAEPYGCKKSSHIFSHHSYFTEQKIHNSANLCEWTDYGNTFSHESNFAQHQNIYTFEKSYEFKDFEKAFSSSSHFISLL

SEQ ID NO: 16428 - protein, 576 aa, Homo Sapiens
MDSVAFEDVSVSFSQEEWALLAPSQKKLYRDVMQETFKNLASIGEKWEDPNVEDQHKNQGRNLRSHTGERLCEGKEGSQCAENFSPNLSVTKKTAGVKPYECTICGKAFMRLSSLTRHMRSHTGYELFEKPYKCKECEKAFSYLKSFQRHERSHTGEKPYKCKQCGKTFIYHQPFQRHERTHIGEKPYECKQCGKALSCSSSLRVHERIHTGEKPYECKQCGKAFSCSSSIRVHERTHTGEKPYACKECGKAFISHTSVLTHMITHNGDRPYKCKECGKAFIFPSFLRVHERIHTGEKPYKCKQCGKAFRCSTSIQIHERIHTGEKPYKCKECGKSFSARPAFRVHVRVHTGEKPYKCKECGKAFSRISYFRIHERTHTGEKPYECKKCGKTFNYPLDLKIHKRNHTGEKPYECKECAKTFISLENFRRHMITHTGDGPYKCRDCGKVFIFPSALRTHERTHTGEKPYECKQCGKAFSCSSYIRIHKRTHTGEKPYECKECGKAFIYPTSFQGHMRMHTGEKPYKCKECGKAFSLHSSFQRHTRIHNYEKPLECKQCGKAFSVSTSLKKHMRMHNR

SEQ ID NO: 16429 - protein, 632 aa, Homo Sapiens
MAAAALRDPAQGCVTFEDVTIYFSQEEWVLLDEAQRLLYCDVMLENFALIASLGLISFRSHIVSQLEMGKEPWVPDSVDMTSAMARGAYGRPGSDFCHGTEGKDLPSEHNVSVEGVAQDRSPEATLCPQKTCPCDICGLRLKDILHLAEHQTTHPRQKPFVCEAYVKGSEFSANLPRKQVQQNVHNPIRTEEGQASPVKTCRDHTSDQLSTCREGGKDFVATAGFLQCEVTPSDGEPHEATEGVVDFHIALRHNKCCESGDAFNNKSTLVQHQRIHSRERPYECSKCGIFFTYAADLTQHQKVHNRGKPYECCECGKFFSQHSSLVKHRRVHTGESPHVCGDCGKFFSRSSNLIQHKRVHTGEKPYECSDCGKFFSQRSNLIHHKRVHTGRSAHECSECGKSFNCNSSLIKHWRVHTGERPYKCNECGKFFSHIASLIQHQIVHTGERPHGCGECGKAFSRSSDLMKHQRVHTGERPYECNECGKLFSQSSSLNSHRRLHTGERPYQCSECGKFFNQSSSLNNHRRLHTGERPYECSECGKTFRQRSNLRQHLKVHKPDRPYECSECGKAFNQRPTLIRHQKIHIRERSMENVLLPCSQHTPEISSENRPYQGAVNYKLKLVHPSTHPGEVP

SEQ ID NO: 16430 - protein, 406 aa, Homo Sapiens
MIEYQIPVSFKDVVVGFTQEEWHRLSPAQRALYRDVMLETYSNLVSVGYEGTKPDVILRLEQEEAPWIGEAACPGCHCWEDIWRVNIQRKRRQDMLLRPGAAISKKTLPKEKSCEYNKFGKISLLSTDLFSSIQSPSNWNPCGKNLNHNLDLIGFKRNCAKKQDECYAYGKLLQRINHGRRPNGEKPRGCSHCEKAFTQNPALMYKPAVSDSLLYKRKRVPPTEKPHVCSECGKAFCYKSEFIRHQRSHTGEKPYGCTDCGKAFSHKSTLIKHQRIHTGVRPFECFFCGKAFTQKSHRTEHQRTHTGERPFVCSECGKSFGEKSYLNVHRKMHTGERPYRCRECGKSFSQKSCLNKHWRTHTGEKPYGCNECGKAFYQKPNLSRHQKIHARKNAYRNENLIIVGNT

SEQ ID NO: 16431 - protein, 643 aa, Homo Sapiens
MASVALEDVAVNFTREEWALLGPCQKNLYKDVMQETIRNLDCVGMKWKDQNIEDQYRYPRKNLRCRMLERFVESKDGTQCGETSSQIQDSIVTKNTLPGVGPYESRMSGEVIMGHSSLNCYIRVGAGHKPYEYHECGEKPDTHKQRGKAFSYHNSLQTHERLHTGKKPYNCKECGKSFSSLGNLQRHMAVQRGDGPYKCKLCGKAFFWPSLLHMHERTHTGEKPYECKQCSKAFSFYSSYLRHERTHTGEKLYECKQCSKAFPDYSSCLRHERTHTGKKPYTCKQCGKAFSASTSLRRHETTHTDEKPYACQQCGKAFHHLGSFQRHMVMHTRDGPHKCKICGKGFDCPSSLKSHERTHTGEKLYECKQCGKALSHSSSFRRHMTMHTGDGPHKCKICGKAFVYPSVFQRHEKTHTAEKPYKCKQCGKAYRISSSLRRHETTHTGEKPYKCKCGKAFIDFYSFQNHKTTHAGEKPYECKECGKAFSCFQYLSQHRRTHTGEKPYECNTCKKAFSHFGNLKVHERIHSGEKPYECKECGKAFSWLTCFLRHERIHMREKPYECQQCGKAFTHSRFLQGHEKTHTGENPYECKECGKAFASLSSLHRHKKTHWKKTHTGENPYGCKECGKAFASLSSLHRHKKTH

SEQ ID NO: 16432 - protein, 575 aa, Homo Sapiens
MDPEDEGVAGVMSVGPPAARLQEPVTFRDVAVDFTQEEWGQLDPTQRILYRDVMLETFGHLLSIGPELPKPEVISQLEQGTELWVAERGTTQGCHPAWEPRSESQASRKEEGLPEEEPSHVTGREGFPTDAPYPTTLGKDRECQSQSLALKEQNNLKQLEFGLKEAPVQDQGYKTLRLRENCVLSSSPNPFPEISRGEYLYTYDSQITDSEHNSSLVSQQTGSPGKQPGENSDCHRDSSQAIPITELTKSQVQDKPYKCTDCGKSFNHNAHLTVHKRIHTGERPYMCKECGKAFSQNSSLVQHERIHTGDKPYKCAECGKSFCHSTHLTVHRRIHTGEKPYECQDCGRAFNQNSSLGRHKRTHTGEKPYTCSVCGKSFSRTTCLFLHLRTHTEERPYECNHCGKGFRHSSSLAQHQRKHAGEKPFECRQRLIFEQTPALTKHEWTEALGCDPPLSQDERTHRSDRPFKCNQCGKCFIQSSHLIRHQITHTREEQPHGRSRRREQSSSRNSHLVQHQHPNSRKSSAGGAKAGQPESRALALFDIQKIMQEKNPVHVIGVEEPSVGASMLFDIREST

SEQ ID NO: 16433 - protein, 273 aa, Homo Sapiens
MSPKRDGLGTGDGLHSQVLQEQVSTGDNLHECDSQGPSKDTLVREGKTYKCKECGSVFNKNSLLVRHQQIHTGVKPYECQECGKAFPEKVDFVRPMRIHTGEKPCKCVECGKVFNRRSHLLCYRQIHTGEKPYECSECGKTFSYHSVFIQHRVTHTGEKLFGCKECGKTFYYNSSLTRHMKIHTGEKPCKCSECGKTFTYRSVFFRHSMTHTAGKPYECKECGKGFYYSYSLTRHTRSHTGEKPYECLEHRKDFGYHSAFAQQSKIHSGGKNL

SEQ ID NO: 16434 - protein, 664 aa, Homo Sapiens
MPLRDKYCQTDHHHHGCCEPVYILEPGDPPLLQQPLQTSKSGIQQIIECFRSGTKQLKHILLKDVDTIFECKLCRSLFRGLPNLITHKKFYCPPSLQMDDNLPDVNDKQSQAINDLLEAIYPSVDKREYIIKLEPIETNQNAVFQYISRTDNPIEVTESSSTPEQTEVQIQETSTEQSKTVPVTDTEVETVEPPPVEIVTDEVAPTSDEQPQESQADLETSDNSDFGHQLICCLCRKEFNSRRGVRRHIRKVHKKKMEELKKYIETRKNPNQSSKGRSKNVLVPLSRSCPVCCKSFATKANVRRHFDEVHRGLRRDSITPDIATKPGQPLFLDSISPKKSFKTRKQKSSSKAEYNLTACKCLLCKRKYSSQIMLKRHMQIVHKITLSGTNSKREKGPNNTANSSEIKVKVEPADSVESSPPSITHSPQNELKGTNHSNEKKNTPAAQKNKVKQDSESPKSTSPSAAGGQQKTRKPKLSAGFDFKQLYCKLCKRQFTSKQNLTKHIELHTDGNNIYVKFYKCPLCTYETRRKRDVIRHITVVHKKSSRYLGKITASLEIRAIKKPIDFVLNKVAKRGPSRDEAKHSDSKHDGTSNSPSKKYEVADVGIEVKVTKNFSLHRCNKCGKAFAKKTYLEHHKKTHKANASNSPEGNKTKGRSTRSKALV

SEQ ID NO: 16435 - protein, 1209 aa, Homo Sapiens
MECYYIVISSTHLSNGHFRNIKGVFRGPLSKNGNKTLDYAEKENTIAKALEDLKANFYCELCDKQYYKHQEFDNHINSYDHAHKQRLKELKQREFARNVASKSRKDERKQEKALQRLHKLAELRKETVCAPGSGPMFKSTTVTVRENCNEISQRVVVDSVNNQQDFKYTLIHSEENTKDATTVAEDPESANNYTAKNNQVGDQAQGIHRHKIGFSFAFPKKASVKLESSAAAFSEYSDDASVGKGFSRKSRFVPSACHLQQSSPTDVLLSSEEKTNSFHPPEAMCRDKETVQTQEIKEVSSEKDALLLPSFCKFQLQLSSDADNCQNSVPLADQIPLESVVINEDIPVSGNSFELLGNKSTVLDMSNDCISVQATTEENVKHNEASTTEVENKNGPETLAPSNTEEVNITIHKKTNFCKRQCEPFVPVLNKHRSTVLQWPSEMLVYTTTKPSISYSCNPLCFDFKSTKVNNNLDKNKPDLKDLCSQQKQEDICMGPLSDYKDVSTEGLTDYEIGSSKNKCSQVTPLLADDILSSSCDSGKNENTGQRYKNISCKIRETEKYNFTKSQIKQDTLDEKYNKIRLKETHEYWFHKSRRKKKRKKLCQHHHMEKTKESETRCKMEAENSYTENAGKYLLEPISEKQYLAAEQLLDSHQLLDKRPKSESISLSDNEEMCKTWNTEYNTYDTISSKNHCKKNTILLNGQSNATMIHSGKHNLTYSRTYCCWKTKMSSCSQDHRSLVLQNDMKHMSQNQAVKRGYNSVMNESERFYRKRRQHSHSYSSDESLNRQNHLPEEFLRPPSTSVAPCKPKKKRRRKRGRFHPGFETLELKENTDYPVKDNSSLNPLDRLISEDKKEKMKPQEVAKIERNSEQTNQLRNKLSFHPNNLLPSETNGETEHLEMETTSGELSDVSNDPTTSVCVASAPTKEAIDNTLLEHKERSENINLNEKQIPFQVPNIERNFRQSQPKSYLCHYELAEALPQGKMNETPTEWLRYNSGILNTQPPLPFKEAHVSGHTFVTAEQILAPLALPEQALLIPLENHDKFKNVPCEVYQHILQPNMLANKVKFTFPPAALPPPSTPLQPLPLQQSLCSTSVTTIHHTVLQQHAAAAAAAAAAAAAGTFKVLQPHQQFLSQIPALTRTSLPQLSVGPVGPRLCPGNQPTFVAPPQMPIIPASVLHPSHLAFPSLPHALFPSLLSPHPTVIPLQPLF

SEQ ID NO: 16436 - protein, 1349 aa, Homo Sapiens
MACYLVISSRHLSNGHYRGIKGVFRGPLCKNGSPSPDFAEKKSTAKALEDVKANFYCELCDKQYHKHQEFDNHINSYDHAHKQRLKELKQREFARNVASKSWKDEKKQEKALKRLHQLAELRQQSECVSGNGPAYKAPRVAIEKQLQQGIFPIKNGRKVSCMKSALLLKGKNLPRIISDKQRSTMPNRHQLQSDRRCLFGNQVLQTSSDLSNANHRTGVSFTFSKKVHLKLESSASVFSENTEETHDCNKSPIYKTKQTADKCKCCRFANKDTHLTKEKEVNISPSHLESVLHNTISINSKILQDKHDSIDETLEDSIGIHASFSKSNIHLSDVDFTPTSREKETRNTLKNTLENCVNHPCQANASFSPPNIYNHSDARISECLDEFSSLEPSEQKSTVHLNPNSRIENREKSLDKTERVSKNVQRLVKEACTHNVASKPLPFLHVQSKDGHTTLQWPTELLLFTKTEPCISYGCNPLYFDFKLSRNTKEDHNLEDLKTELGKKPLELKTKRESQVSGLTEDQQKLIQEDYQYPKPKTMIANPDWEKFQRKYNLDYSDSEPNKSEYTFSANDLEMKNPKVPLYLNTSLKDCAGKNNSSENKLKEASRAHWQGCRKAVLNDIDEDLSFPSYISRFKKHKLIPCSPHLEFEDERQFNCKSSPCTVGGHSDHGKDFSVILKSNHISMTSKVSGCGNQRYKRYSPQSCLSRYSSSLDTSPSSMSSLRSTCSSHRFNGNSRGNLLCFHKREHHSVERHKRKCLKHNCFYLSDDITKSSQMQSEPQKERNCKLWESFKNEKYSKRRYCHCRERQKLGKNQQQFSGLKSTRIIYCDSNSQISCTGSSKKPPNCQGTQHDRLDSYSIEKMYYLNKSKRNQESLGSPHICDLGKVRPMKCNSGNISCLLKNCSSGPSETTESNTAEGERTPLTAKILLERVQAKKCQEQSSNVEISSNSCKSELEAPSQVPCTIQLAPSGCNRQALPLSEKIQYASESRNDQDSAIPRTTEKDKSKSSHTNNFTILADTDCDNHLSKGIIHLVTESQSLNIKRDATTKEQSKPLISEIQPFIQSCDPVPNEFPGAFPSNKYTGVTDSTETQEDQINLDLQDVSMHINHVEGNINSYYDRTMQKPDKVEDGLEMCHKSISPPLIQQPITFSPDEIDKYKILQLQAQQHMQKQLLSKHLRVLPAAGPTAFSPASTVQTVPVHQHTSITTIHHTFLQHFAVSASLSSHSSHLPIAHLHPLSQAHFSPISFSTLTPTIIPAHPTFLAGHPLHLVAATPFHPSHITLQPLPPTAFIPTLFGPHLNPATTSIIHLNPLIQPVFQGQDFCHHSCSSQMQQLNEVKEALNVSTHLN

SEQ ID NO: 16437 - protein, 627 aa, Homo Sapiens
MAMALTDPAQVSVTFDDVAVTFTQEEWGQLDLAQRTLYQEVMLENCGLLVSLGCPVPRPELIYHLEHGQEPWTRKEDLSQGTCPGDKGKPKSTEPTTCELALSEGISFWGQLTQGASGDSQLGQPKDQDGFSEMQGERLRPGLDSQKEKLPGKMSPKHDGLGTADSVCSRIIQDRVSLGDDVHDCDSHGSGKNPVIQEEENIFKCNECEKVFNKKRLLARHERIHSGVKPYECTECGKTFSKSTYLLQHHMVHTGEKPYKCMECGKAFNRKSHLTQHQRIHSGEKPYKCSECGKAFTHRSTFVLHNRSHTGEKPFVCKECGKAFRDRPGFIRHYIIHSGENPYECFECGKVFKHRSYLMWHQQTHTGEKPYECSECGKAFCESAALIHHYVIHTGEKPFECLECGKAFNHRSYLKRHQRIHTGEKPYVCSECGKAFTHCSTFILHKRAHTGEKPFECKECGKAFSNRADLIRHFSIHTGEKPYECMECGKAFNRRSGLTRHQRIHSGEKPYECIECGKTFCWSTNLIRHSIIHTGEKPYECSECGKAFSRSSSLTQHQRMHTGRNPISVTDVGRPFTSGQTSVNIQELLLGKNFLNVTTEENLLQEEASYMASDRTYQRETPQVSSL

SEQ ID NO: 16438 - protein, 589 aa, Homo Sapiens
MIKFQERVTFKDIAVIFTKEELAVLDKAQINLYQDVMLENFRNFISVDGIKNNILNLQGKGLIYLSQEELHCWKIWKQRIRDLSVSQDYIMNLQEQCSPHLEDVSLCEEWAGMSLQISENENYVVNAIIKNQDITAWQSLTQVLTPESWRKANIMTEPQKSQGRYKGIYVEEKLYRHARHDESLNWTSRDHHESQECKGEDPGRHPNCGKNLGMKSTVEQHHAVHVLPQPFTCNNCGVAFADDTDPRVHHSTHLGEKSYKCDQYGKNLSQSQYLIVHCKTHSGETPYEFHEWPTGCKQSSDLPRCQKVPSGDNPYKCKECGKGFRCNSSLHNHHRVHTGEMPYKCHVCGKAFGFRSLPCIHQGVHTGKKPYKCEDCGKGFEQSSNLLIHQRVHTGEKPYKSSECGKCFSSSSVLQVHWRFHTGEKPYRCGECGKGFSQSTHLHIHQRVHTGEKQYNAMCVERILGIVLFFTLIREFTLQKNHINAKCVESALVTVHIFTSIKAITQERNHINVMSVVKASVGIQIFNVHLRVHRGQRPCKCKACGKGFSRNSHLLAQQRVRIDKTQYTHCEHGKDLLTHQRLHEQRETL

SEQ ID NO: 16439 - protein, 903 aa, Homo Sapiens
MLREEAAQKRKGKESGMALPQGRLTFRDVAIEFSLAEWKFLNPAQRALYREVMLENYRNLEAVDISSKHMMKEVLSTGQGNREVIHTGTLQRHQSYHIGDFCFQEIEKEIHNIEFQCQEDERNGHEAPTTKIKKLTGSTDQHDHRHAGNKPIKDQLGSSFYSHLPELHIFQIKGEIANQLEKSTSDASSVSTSQRISCRPQIHISNNYGNNPLNSSLLPQKQEVHMREKSFPCNESGKAFNCSSLLRKHQIPHLGDKQYKCDVCGKLFNHKQYLACHRRCHTGEKPYKCKECGKSFSYKSSLTCHHRLHTGVKPYKCNECGKVFRQNSALVIHKAIHTGEKPYKCNECGKAFNQQSHLSRHQRLHTGVKPYKCKICEKAFACHSYLANHTRIHSGEKTYKCNECGKAFNHQSSLARHHILHTGEKPYKCEECDKVFSQKSTLERHKRIHTGEKPYKCKVCDTAFTCNSQLARHRRIHTGEKTYKCNECRKTFSRRSSLLCHRRLHSGEKPYKCNQCGNTFRHRASLVYHRRLHTLEKSYKCTVCNKVFMRNSVLAVHTRIHTAKKPYKCNECGKAFNQQSHLSRHRRLHTGEKPYKCEACDKVFGQKSALESHKRIHTGEKPYRCQVCDTAFTWNSQLARHTRIHTGEKTYKCNECGKTFSYKSSLVWHRRLHGGEKSYKCKVCDKAFVCRSYVAKHTRIHSGMKPYKCNECSKTFSNRSSLVCHRRIHSGEKPYKCSECSKTFSQKATLLCHRRLHSGEKPYKCNDCGNTFRHWSSLVYHRRLHTGEKSYKCTVCDKAFVRNSYLARHIRIHTAEKPYKCNECGKAFNEQSHLSRHHRIHTGEKPYKCEACDKVFSRKSHLKRHRIIHTGEKPYKCNECGKAFSDRSTLIHHQAIHGIGKFD

SEQ ID NO: 16440 - protein, 661 aa, Homo Sapiens
MPANEDAPQPGEHGSACEVSVSFEDVTVDFSREEWQQLDSTQRRLYQDVMLENYSHLLSVGFEVPKPEVIFKLEQGEGPWTLEGEAPHQSCSDGKFGIKPSQRRISGKSTFHSEMEGEDTRDDSLYSILEELWQDAEQIKRCQEKHNKLLSRTTFLNKKILNTEWDYEYKDFGKFVHPSPNLILSQKRPHKRDSFGKSFKHNLDLHIHNKSNAAKNLDKTIGHGQVFTQNSSYSHHENTHTGVKFCERNQCGKVLSLKHSLSQNVKFPIGEKANTCTEFGKIFTQRSHFFAPQKIHTVEKPHELSKCVNVFTQKPLLSIYLRVHRDEKLYICTKCGKAFIQNSELIMHEKTHTREKPYKCNECGKSFFQVSSLLRHQTTHTGEKLFECSECGKGFSLNSALNIHQKIHTGERHHKCSECGKAFTQKSTLRMHQRIHTGERSYICTQCGQAFIQKAHLIAHQRIHTGEKPYECSDCGKSFPSKSQLQMHKRIHTGEKPYICTECGKAFTNRSNLNTHQKSHTGEKSYICAECGKAFTDRSNFNKHQTIHTGEKPYVCADCGRAFIQKSELITHQRIHTTEKPYKCPDCEKSFSKKPHLKVHQRIHTGEKPYICAECGKAFTDRSNFNKHQTIHTGDKPYKCSDCGKGFTQKSVLSMHRNIHT

SEQ ID NO: 16441 - protein, 617 aa, Homo Sapiens
MALPQGLLTFRDVAIEFSQEEWKCLDPAQRTLYRDVMLENYRNLVSLDISSKCMMKEFSSTAQGNREVIHTGTLQRHESHHTGDFRFQEIDKDIHNLEFQWQEDERNSHEAPMTEIKKLTGSADRYDQRHAGNKPIKDQLGSSFHSHLPELHMFQTQGKIGNQVEKSINDASSISTSQRISCRPKTHISNNYGNNFRNSSLLTQKQEVHMREKSFQCNESGKAFNYSSLLRKHQIIHLGEKQYKCDVCGKVFNRKRNLVCHRRCHTGEKPYRCNECGKTFSQTYSLTCHRRLHTGEKPYKCEECDKAFSFKSNLKRHRRIHAGEKPYKCNECGKTFSQTSSLTCHRRLHTGEKPFKCNECGKTFSRKSSLTCHHRLHTGEKPYKCNECGKTFSQELTLKCHRRLHTGEKPYKCNECGKVFNKKANLARHHRLHSGEKPYKCTECVKTFSRNSALVIHKAIHIGEKRYKCNECGKTFSRISALVIHTAIHTGEKPYKCNECGKGFNRKTHLACHHRLHTGEKPYKCNECGKVFNRKTHLAHHHRLHTGDKPYKCNECGKVFNQKAHLARHHRLHTGEKPYKCNECGKVFNQKANLARHHRLHTGEKPYKFNECGKAFN

SEQ ID NO: 16442 - protein, 855 aa, Homo Sapiens
MAAAATLRLSAQGTVTFEDVAVNFTWEEWNLLSEAQRCLYRDVTLENLALISSLGCWCGVEDEAAPSKQSIYIQRETQVRTPMAGVSPKKAHPCEMCGPILGDILHVADHQGTHHKQKLHRCEAWGNKLYDSGNFHQHQNEHIGEKPYRGSVEEALFAKRCKLHVSGESSVFSESGKDFLPRSGLLQQEASHTGEKSNSKTECVSPIQCGGAHYSCGESMKHFSTKHILSQHQRLLTREECYVCCECGKSFSKYASLSNHQRVHTEKKHECGECGKSFSKYVSFSNHQRVHTEKKHECGECGKSFSKYVSFSNHQRVHTGKRPYECGECGKSFSKYASFSNHQRVHTEKKHYECGECGKSFSKYVSFSNHQRVHTGKRPYECGECGKSFSKYASFSNHQRVHTDKKHYECGECGKSFSQKSSLIQHQRFHTGEKPYGCEECGKSFSSEGHLRSHQRVHAGERPFKCGECVKSFSHKRSLVHHQRVHSGERPYQCGECGKSFSQKGNLVLHQRVHTGARPYECGECGKSFSSKGHLRNHQQIHTGDRLYECGECGKSFSHKGTLILHQRVHPRERSYGCGECGKSFSSIGHLRSHQRVHTGERPYECGECGKSFSHKRSLVHHQRMHTGERPYKCGDCGKSFNEKGHLRNHQRVHTTERPFKCGECGKCFSHKGNLILHQHGHTGERPYVCRECGKLFKKKSHLLVHQRIHNGEKPYACEACQKFFRNKYQLIAHQRVHTGERPYECNDCGKSFTHSSTFCVHKRIHTGEKPYECSECGKSFAESSSFTKHKRVHTGEKPYECSECGKSFAESSSLTKHKRVHTGEKPYKCEKCGKLFNKKSHLLVHQSSHWRKAI

SEQ ID NO: 16443 - protein, 651 aa, Homo Sapiens
MLREEATKKSKEKEPGMALPQGRLTFRDVAIEFSLEEWKCLNPAQRALYRAVMLENYRNLEFVDSSLKSMMEFSSTRHSITGEVIHTGTLQRHKSHHIGDFCFPEMKKDIHHFEFQWQEVERNGHEAPMTKIKKLTGSTDRSDHRHAGNKPIKDQLGLSFHSHLPELHMFQTKGKISNQLDKSIGASSASESQRISCRLKTHISNKYGKNFLHSSFTQIQEICMREKPCQSNECGKAFNYSSLLRRHHITHSREREYKCDVCGKIFNQKQYIVYHHRCHTGEKTYKCNECGKTFTQMSSLVCHRRLHTGEKPYKCNECGKTFSEKSSLRCHRRLHTGEKPYKCNECGKTFGRNSALVIHKAIHTGEKPYKCNECGKTFSQKSSLQCHHILHTGEKPYKCEECDNVYIRRSHLERHRKIHTGEGSYKCKVCDKVFRSDSYLAEHQRVHTGEKPYKCNKCGRSFSRKSSLQYHHTLHTGEKPYTCNECGKVFSRRENLARHHRLHAGEKPYKCEECDKVFSRRSHLERHRRIHTGEKPYKCKVCDKAFRSDSCLANHTRVHTGEKPYKCNKCAKVFNQKGILAQHQRVHTGEKPYKCNECGKVFNQKASLAKHQRVHTAEKPYKCNECGKAFTGQSTLIHHQAIHGCRETLQM

SEQ ID NO: 16444 - protein, 412 aa, Homo Sapiens
MSRRKQTNPNKVHWDQVFAGLEEQARQAMMKTDFPGDLGSQRQAIQQLRDQDSSSSDSEGDEEETTQDEVSSHTSEEDGGVVKVEKELENTEQPVGGNEVVEHEVTGNLNSDPLLELCQCPLCQLDCGSREQLIAHVYQHTAAVVSAKSYMCPVCGRALSSPGSLGRHLLIHSEDQRSNCAVCGARFTSHATFNSEKLPEVLNMESLPTVHNEGPSSAEGKDIAFSPPVYPAGILLVCNNCAAYRKLLEAQTPSVRKWALRRQNEPLEVRLQRLERERTAKKSRRDNETPEEREVRRMRDREAKRLQRMQETDEQRARRLQRDREAMRLKRANETPEKRQARLIREREAKRLKRRLEKMDMMLRAQFGQDPSAMAALAAEMNFFQLPVSGVELDSQLLGKMAFEEQNSSSLH

SEQ ID NO: 16445 - protein, 610 aa, Homo Sapiens
MDSVAFEDVAVNFTQEEWALLGPSQKSLYRNVMQETIRNLDCIEMKWEDQNIGDQCQNAKRNLRSHTCEIKDDSQCGETFGQIPDSIVNKNTPRVNPCDSGECGEVVLGHSSLNCNIRVDTGHKSCEHQEYGEKPYTHKQRGKAISHQHSFQTHERPPTGKKPFDCKECAKTFSSLGNLRRHMAAHHGDGPYKCKLCGKAFVWPSLFHLHERTHTGEKPYECKQCSKAFPFYSSYLRHERIHTGEKAYECKQCSKAFPDYSTYLRHERTHTGEKPYKCTQCGKAFSCYYYTRLHERTHTGEQPYACKQCGKTFYHHTSFRRHMIRHTGDGPHKCKICGKGFDCPSSVRNHETTHTGEKPYECKQCGKVLSHSSSFRSHMITHTGDGPQKCKICGKAFGCPSLFQRHERTHTGEKPYQCKQCGKAFSLAGSLRRHEATHTGVKPYKCQCGKAFSDLSSFQNHETTHTGEKPYECKECGKAFSCFKYLSQHKRTHTVEKPYECKTCRKAFSHFSNLKVHERIHSGEKPYECKECGKAFSWLTCLLRHERIHTGEKPYECLQCGKAFTRSRFLRGHEKTHTGEKLYECKECGKALSSLRSLHRHKRTHWKDTL

SEQ ID NO: 16446 - protein, 1081 aa, Homo Sapiens
MPRRKQEQPKRLPSHVSRQEEAEGELSEGEHWYGNSSETPSEASYGEVQENYKLSLEDRIQEQSTSPDTSLGSTTPSSHTLELVALDSEVLRDSLQCQDHLSPGVSSLCDDDPGSNKPLSSNLRRLLEAGSLKLDAAATANGRVESPVNVGSNLSFSPPSHHAQQLSVLARKLAEKQEQNDQYTPSNRFIWNQGKWLPNSTTTCSLSPDSAILKLKAAANAVLQDKSLTRTEETMRFESFSSPFSSQSASSTLAALSKKVSERSLTPGQEHPPPASSFLSLASMTSSAALLKEVAARAAGSLLAEKSSLLPEDPLPPPPSEKKPEKVTPPPPPPPPPPPPPPPQSLELLLLPVPKGRVSKPSNSASEEESGKPFQCPICGLVIKRKSYWKRHMVIHTGLKSHQCPLCPFRCARKDNLKSHMKVHQHQDRGETFQCQLCPFTSSRHFSLKLHMRCHQHFLRTEAKVKEEIPDPDVKGSPHLSDSACLGQQREGGGTELVGTMMTSNTPERTSQGGAGVSPLLVKEEPKEDNGLPTSFTLNAADRPANHTKLKDPSEYVANSASALFSQDISVKMASDFLMKLSAANQKEPMNLNFKVKEEPKEGESLSTTLPRSSYVFSPESEVSAPGVSEDALKPQEGKGSVLRRDVSVKAASELLMKLSAESYKETQMVKIKEEPMEVDIQDSHVSISPSRNVGYSTLIGREKTEPLQKMPEGRVPPERNLFSQDISVKMASELLFQLSEKVSKEHNHTKENTIRTTTSPFFSEDTFRQSPFTSNSKELLPSDSVLHGRISAPETEKIVLEAGNGLPSWKFNDQLFPCDVCGKVFGRQQTLSRHLSLHTEERKYKCHLCPYAAKCRANLNQHLTVHSVKLVSTDTEDIVSAVTSEGSDGKKHPYYYSCHVCGFETELNVQFVSHMSLHVDKEQWMFSICCTACDFVTMEEAEIKTHIGTKHTGEDRKTPSESNSPSSSSLSALSDSANSKDDSDGSQKNKGGNNLLVISVMPGSQPSLNSEEKPEKGFECVFCNFVCKTKNMFERHLQIHLITRMFECDVCHKFMKTPEQLLEHKKCHTVPTGGLNSGQW

SEQ ID NO: 16447 - protein, 432 aa, Homo Sapiens
MPHSPLISIPHVWCHPEEEERMHDELLQAVSKGPVMFRDVSIDFSQEEWECLDADQMNLYKEVMLENFSNLVSVGLSNSKPAVISLLEQGKEPWMVDRELTRGLCSDLESMCETKILSLKKRHFSQVIITREDMSTFIQPTFLIPPQKTMSEEKPWECKICGKTFNQNSQFIQHQRIHFGEKHYESKEYGKSFSRGSLVTRHQRIHTGKKPYECKECGKAFSCSSYFSQHQRIHTGEKPYECKECGKAFKYCSNLNDHQRIHTGEKPYECKVCGKAFTKSSQLFLHLRIHTGEKPYECKECGKAFTQHSRLIQHQRMHTGEKPYECKQCGKAFNSASTLTNHHRIHAGEKLYECEECRKAFIQSSELIQHQRIHTDEKPYECNECGKAFNKGSNLTRHQRIHTGEKPYDCKECGKAFGSRSDLIRHEGIHTG

SEQ ID NO: 16448 - protein, 516 aa, Homo Sapiens
MHGRKDDAQKQPVKNQLGLNPQSHLPELQLFQAEGKIYKYDHMEKSVNSSSLVSPPQRISSTVKTHISHTYECNFVDSLFTQKEKANIGTEHYKCSERGKAFHQGLHFTIHQIIHTKETQFKCDICGKIFNKKSNLASHQRIHTGEKPYKCNECGKVFHNMSHLAQHRRIHTGEKPYKCNECGKVFNQISHLAQHQRIHTGEKPYKCNECGKVFHQISHLAQHRTIHTGEKPYECNKCGKVFSRNSYLVQHLIIHTGEKPYRCNVCGKVFHHISHLAQHQRIHTGEKPYKCNECGKVFSHKSSLVNHWRIHTGEKPYKCNECGKVFSHKSSLVNHWRIHTGEKPYKCNECGKVFSRNSYLAQHLIIHAGEKPYKCDECDKAFSQNSHLVQHHRIHTGEKPYKCDECGKVFSQNSYLAYHWRIHTGEKAYKCNECGKVFGLNSSLAHHRKIHTGEKPFKCNECGKAFSMRSSLTNHHAIHTGEKHFKCNECGKLFRDNSYLVRHQRFHAGKKSNTCN

SEQ ID NO: 16449 - protein, 372 aa, Homo Sapiens
MASSASARTPAGKRVINQEELRRLMKEKQRLSTSRKRIESPFAKYNRLGQLSCALCNTPVKSELLWQTHVLGKQHREKVAELKGAKEASQGSSASSAPHSVKRKAPDADDQDVKRAKATLVPQVQPSTSAWTTNFDKIGKEFIRATPSKPSGLSLLPDYEDEEEEEEEEEGDGERKRGDASKPLSDAQGKEHSVSSSREVTSSVLPNDFFSTNPPKAPIIPHSGSIEKAEIHEKVVERRENTAEALPEGFFDDPEVDARVRKVDAPKDQMDKEWDEFQKAMRQVNTISEAIVAEEDEEGRLDRQIGEIDEQIECYRRVEKLRNRQDEIKNKLKEILTIKELQKKEEENADSDDEGELQDLLSQDWRVKGALL

SEQ ID NO: 16450 - protein, 1677 aa, Homo Sapiens
MEVPEPTCPAPPARDQPAPTPGPPGAPGGQASPHLTLGPVLLPPEQGLAPPTVFLKALPIPLYHTVPPGGLQPRAPLVTGSLDGGNVPFILSPVLQPEGPGPTQVGKPAAPTLTVNIVGTLPVLSPGLGPTLGSPGKVRNAGKYLCPHCGRDCLKPSVLEKHIRSHTGERPFPCATCGIAFKTQSNLYKHRRTQTHLNNSRLSSESEGAGGGLLEEGDKAGEPPRPEGRGESRCQGMHEGASERPLSPGAHVPLLAKNLDVRTEAAPCPGSAFADREAPWDSAPMASPGLPAASTQPWRKLPEQKSPTAGKPCALQRQQATAAEKPWDAKAPEGRLRKCESTDSGYLSRSDSAEQPHAPCSPLHSLSEHSAESEGEGGPGPGPGVAGAEPGAREAGLELEKKRLEERIAQLISHNQAVVDDAQLDNVRPRKTGLSKQGSIDLPTPYTYKDSFHFDIRALEPGRRRAPGPVRSTWTPPDKSRPLFFHSVPTQLSTTVECVPVTRSNSLPFVEGSRTWLEPREPRDPWSRTQKPLSPRPGPARLGCRSGLSSTDVPSGHPRALVRQAAVEDLPGTPIGDALVPAEDTDAKRTAAREAMAGKGRAGGRKCGQRRLKMFSQEKWQVYGDETFKRIYQKMKASPHGGKKAREVGMGSGAELGFPLQKEAAGSSGTVPTQDRRTPVHEDISAGATPEPWGNPPALEASLVTEPTKHGETVARRGDSDRPRVEEAVSSPALGGRDSPCSGSRSPLVSPNGRLELGWQMPPAPGPLKGGDVEAPRPVWPDPKLEGGARGVGDVQETCLWAQTVLRWPSRGSGEDKLPSERKKLKVEDLHSWKQPEPVSAETPGGPTQPASLSSQKQDADPGEVPGGSKESARQVGEPLESSGASLAAASVALKRVGPRDKATPLHPAAPAPAEHPSLATPPQAPRVLSALADNAFSPKYLLRLPQAETPLPLPIPWGPRHSQDSLCSSGWPEERASFVGSGLGTPLSPSPASGPSPGEADSILEDPSCSRPQDGRKGAQLGGDKGDRMATSRPAARELPISAPGAPREATSSPPTPTCEAHLVQDMEGDSHRIHRLCMGSTLARARLSGDVLNPWVPNWELGEPPGNAPEDPSSGPLVGPDPCSPLQPGSFLTALTRPQGVPPGWPELALSSHSGTSRSHSTRSPHSTQNPFPSLKAEPRLTWCCLSRSVPLPAEQKAKAASVYLAVHFPGSSLRDEGPNGPPGSNGGWTWTSPGEGGPAQMSKFSYPTVPGVMPQHQVSEPEWKKGLPWRAKMSRGNSKQRKLKINPKRYKGNFLQSCVQLRASRLRTPTWVRRRSRHPPALEGLKPCRTPGQTSSEIAGLNLQEEPSCATSESPPCCGKEEKKEGDCRQTLGTLSLGTSSRIVREMDKRTVKDISPSAGEHGDCTTHSTAATSGLSLQSDTCLAVVNDVPLPPGKGLDLGLLETQLLASQDSVSTDPKPYIFSDAQRPSSFGSKGTFPHHDIATSVAAVCISLPVRTDHIAQEIHSAESRDHSQTAGRTLTSSSPDSKVTEEGRAQTLLPGRPSSGQRISDSVPLESTEKTHLEIPASGPSSASSHHKEGRHKTFFPSRGQYGCGEMTVPCPSLGSDGRKRQVSGLITRKDSVVPSKPEQPIEIPEAPSKSLKKRSLEGMRKQTRVEFSDTSSDDEDRLVIEI

SEQ ID NO: 16451 - protein, 187 aa, Homo Sapiens
MVMHSEDEPYKCKFCGKAFDNLHLYLTHERTHTGEKPYECNKCGKAFSCSSSIRKHARIHTGEKPYICKQCGKAFRYSSSIRNHENTHTGEKPCECKQCGKAFSYSSYFRIHERIHTGEQVYKCKECGKTFTYPSAFHKHKSTHTSQKLYECKECGKAFDCFSSFHSHEGVHTGEKPYECRTWKSLQ

SEQ ID NO: 16452 - protein, 537 aa, Homo Sapiens
MEGLLSVALQGAELEGNWKHEGQVEDLQENQESCPEPEAVACKGDPAGDSMQERDEFSRIPRTISSPAATQASVPDDSSSRRCSAPGESPKERHPDSRQRERGGGPKKPWKCGDCGKAFSYCSAFILHQRIHTGEKPFACPECGKAFSQSVHLTLHQRTHTGEKPYACHECGKAFSQGSYLASHWRTHTGEKPHRCADCGKAFTRVTHLTQHRRVHTGERPYACAQCAKAFRNRSSLIEHQRIHTGEKPYECSACAKAFRFSSALIRHQRIHTEEKPYRCGQCAKAFAQIAHLTQHRRVHTGEKPYTCQDCGALFSQSASLAEHRRIHTGEKPYACGQCAKAFTQVSHLTQHQRTHTGERPYPCHDCGKRFSNRSHLLQHRLVHTGERPYRCLQCGAAFSHVSSLIEHQKIHTGERPYKCGECGKAFSQGSSLALHQRTHTGERPYTCPECGKAFSNRSYLIQHHIVHTGEKPYECSGCGKAFSFSSALIRHQRTHADSSGRLCPAPTPDSTPGLSQGGETCQQGCPGRNPRGPAED

SEQ ID NO: 16453 - protein, 936 aa, Homo Sapiens
MALTQGPLTFRDVAIEFSQEEWKSLDPVQKALYWDVMLENYRNLVFLGILPKCMTKELPPIGNSNTGEKCQTVTLERHECYDVENFYLREIQKNLQDLEFQWKDGEINYKEVPMTYKNNLNGKRGQHSQEDVENKCIENQLTLSFQSRLTELQKFQTEGKIYECNQSEKTVNNSSLVSPLQRILPSVQTNISKKYENEFLQLSLPTQLEKTHIREKPYMCKGCGKAFRVSSSLINHQMVHTTEKPYKCNECGKAFHRGSLLTIHQIVHTRGKPYQCGVCGKIFRQNSDLVNHRRSHTGEKPYKCNECGKSFSQSYNLAIHQRIHTGEKPYKCNECGKTFKQGSCLTTHQIIHTGEKPYQCDICGKVFRQNSNLVNHQRIHTGEKPYKCNICGKSFSQSSNLATHQTVHSGNKPYKCDECGKTFKRSSSLTTHQIIHTGEKPYTCDVCDKVFSQRSQLARHQRSHTGEKPYKCNECGKVFSQTSHLVGHRRIHTGEKPYKCDKCGKAFKQGSLLTRHKIIHTREKRYQCGECGKVFSENSCLVRHLRIHTGEQPYKCNVCGKVFNYSGNLSIHKRIHTGEKPFQCNECGTVFRNYSCLARHLRIHTGQKPYKCNVCGKVFNDSGNLSNHKRIHTGEKPFQCNECGKVFSYYSCLARHRKIHTGEKPYKCNDCGKAYTQRSSLTKHLIIHTGEKPYNCNEFGGAFIQSSKLARYHRNPTGEKPHKCSHCGRTFSHITGLTYHQRRHTGEMPYKCIECGQVFNSTSNLARHRRIHTGEKPYKCNECGKVFRHQSTLARHRSIHTGEKPYVCNECGKAFRVRSILVNHQKMHTGDKPYKCNECGKAFIERSKLVYHQRNHTGEKPYKCIECGKAFGRFSCLNKHQMIHSGEKPYKCNECGKSFISRSGLTKHQTKHTAESLKTKFNVEKPLDVLLTSGFK

SEQ ID NO: 16454 - protein, 531 aa, Homo Sapiens
MEAPAQKAGQGGLPKADAQGASGAREKRPEEPRPLEEDRAGSRPTQKGDLRGAAGGRTTPPGGGSRGCSLGVSPGPGTRHSAGTRPLVREPCGPTSSQNPELVIPEGLQAREGPCRSPARGGDCSRNSCLAWHRGAPAGETPPVCDPCPERIQNHPRTQLCEVHTDCWPCQPGTGAPTCPRTPKPTSRGRNPLVEQPRACACGEAFAWRALRIPQERLQATEEPRPCARCGKRFRPNQQQQAGKSPPVCPECGQTSRPRPIVPDPPAQRLYACDECGKAFTRTSSLLQHQRIHTGERPYECAECGKAFVRCSGLYRHQKTHSAERHRRGPVLARRAFRLGCPPCGDYSERSPRRGSGAGEKPYECADCAKAFGLFSHLVEHRRVHTGEKPYACPECGKAFNQRSNLSRHQRTHSSAKPYACPLCEKAFKGRSGLVQHQRAHTGERPYGCSECGKTFRGCSELRQHERLHSGEKPYICRDCGKAFVRNCSLVRHLRTHTGERPYACGDCGRAFSQRSNLNEHRKRHGGRAAP

SEQ ID NO: 16455 - protein, 811 aa, Homo Sapiens
MLLPTTIQPQTARKSQLPRGNSCLVGLHIASPQLLRVQPLVRTEPQSCFLSDLCQPPAQGFVQRPLPALQVVPAKRVPAPKAPDEQGSMLTPLSASDPLAVTSLSSSSAHPFISNLHTRHTEKLKKSLKVKTRSGRVSRPPKYKAKDYKFIKTEDLADGHLSDSDDYSELCVEEDEDQRERHALFDLSSCSLRPKSFKCQTCEKSYIGKGGLARHFKLNPGHGQLDPEMVLSEKASGSTLRGCTEERTLSLTSLGLSMPADPCEGGARSCLVTESARGGLQNGQSVDVEETLPSEPENGALLRSERYQGPRRRACSETLAESRTAVLQQRRAAQLPGGPAAAGEQRASPSKARLKEFLQQCDREDLVELALPQLAQVVTVYEFLLMKVEKDHLAKPFFPAIYKEFEELHKMVKKMCQDYLSSSGLCSQETLEINNDKVAESLGITEFLRKKEIHPDNLGPKHLSRDMDGEQLEGASSEKREREAAEEGLASVKRPRREALSNDTTESLAANSRGREKPRPLHALAAGFSPPVNVTVSPRSEESHTTTVSGGNGSVFQAGPQLQALANLEARRGSIGAALSSRDVSGLPVYAQSGEPRRLTQAQVAAFPGENALEHSSDQDTWDSLRSPGFCSPLSSGGGAESLPPGGPGHAEAGHLGKVCDFHLNHQQPSPTSVLPTEVAAPPLEKILSVDSVAVDCAYRTVPKPGPQPGPHGSLLTEGCLRSLSGDLNRFPCGMEVHSGQRELESVVAVGEAMAFEISNGSHELLSQGQKQIFIQTSDGLILSPPGTIVSQEEDIVTVTDAEGRACGWAR

SEQ ID NO: 16456 - protein, 738 aa, Homo Sapiens
MTMLQESFSFDDLSVDFTQKEWQLLDPSQKNLYKDVMLENYSSLVSLGYEVMKPDVIFKLEQGEEPWVGDGEIPSSDSPEVWKVDGNMMWHQDNQDKLKIIKRGHECDAFGKNFNLNMNFVPLRKSNSEGDLDGLILKHHLDLLIPKGDYGKAESDDFNVFDNFFLHSKPEDTDTWLKYYDCDKYKESYKKSQIIIYHRNRLGEKLYECSECRKRFSKKPSLIKHQSRHIRDIAFGCGNCGKTFPQKSQFITHHRTHTGEKPYNCSQCGKAFSQKSQLTSHQRTHTGEKPYECGECGKAFSRKSHLISHWRTHTGEKPYGCNECGRAFSEKSNLINHQRIHTGEKPFECRECGKAFSRKSQLVTHHRTHTGTKPFGCSDCRKAFFEKSELIRHQTIHTGEKPYECSECRKAFRERSSLINHQRTHTGEKPHGCIQCGKAFSQKSHLISHQMTHTGEKPFICSKCGKAFSRKSQLVRHQRTHTGEKPYECSECGKAFSEKLSLTNHQRIHTGEKPYVCSECGKAFCQKSHLISHQRTHTGEKPYECSECGKAFGEKSSLATHQRTHTGEKPYECRDCEKAFSQKSQLNTHQRIHTGEKPYECSLCRKAFFEKSELIRHLRTHTGEKPYECNECRKAFREKSSLINHQRIHTGEKPFECSECGKAFSRKSHLIPHQRTHTGEKPYGCSECRKAFSQKSQLVNHQRIHTGEKPYRCIECGKAFSQKSQLINHQRTHTVKKS

SEQ ID NO: 16457 - protein, 716 aa, Homo Sapiens
MSLMGHGKVEMLLYAVPLLKAPNCLSSSMQLPHGGGRHQELVRFRDVAVVFSPEEWDHLTPEQRNLYKDVMLDNCKYLASLGNWTYKAHVMSSLKQGKEPWMMEREVTGDPCPACQPALATFRALNESGNAFRQSFHHGEYRTHRTFVQHYECDDCGMAFGHVSQLTGHQKIHKVGETHEYGENTRGFRHRSSFTMLQRICTLYKHFECNQCGETFNRPSKVIQHQSMHSGLKPYKCDVCQKAFRFLSSLSIHQRFHVGNRVNLTRHQKTHTQRKPFSCNFCGKTFHRFSEKTQHLLIHTRKKYYTCNYCKKEFNPYSKFILHQRTHTGEKPHKCDVCEKSFKSISNLNKHQKTHTGEKPFSCNECKKTFAQRTDLARHQQIHTGKKSFICSSCKKTFVRLSDLTQHKGTHTGERPYQCTTCEKAFKYRSNFTKHQKTHSIGRPFACNECGKTYRLNWELNQHKKIHTGEKPYECGECGKRFNNNSNLNKHKKIHTGEKHFVCNQCGKAFSLNSKLSRHQRTHNKKENSSKSVSNLNKHQKTHAGEKPFPCNECKKAFAQRMDLARHQQIHTGRKPFICSSCKKTFVRLSDLTQHKGTHTGERPYQCTTCEKAFKYQSNFTKHQKTHSIGRPFTCNECGKTFRLNWKLNQHKKIHTGEKPYECGECGKCFNNNSNLSKHKKIHTGEKHFVCNQCGKAFSLNSKLSRHQITHNKKKP

SEQ ID NO: 16458 - protein, 808 aa, Homo Sapiens
MLEGHESYDTENFYFREIRKNLQEVDFQWKDGEINYKEGPMTHKNNLTGQRVRHSQGDVENKHMENQLILRFQSGLGELQKFQTAEKIYGCNQIERTVNNCFLASPLQRIFPGVQTNISRKYGNDFLQLSLPTQDEKTHIREKPYIGNECGKAFRVSSSLINHQMIHTTEKPYRCNESGKAFHRGSLLTVHQIVHTRGKPYQCDVCGRIFRQNSDLVNHRRSHTGDKPYICNECGKSFSKSSHLAVHQRIHTGEKPYKCNRCGKCFSQSSSLATHQTVHTGDKPYKCNECGKTFKRNSSLTAHHIIHAGKKPYTCDVCGKVFYQNSQLVRHQIIHTGETPYKCNECGKVFFQRSRLAGHRRIHTGEKPYKCNECGKVFSQHSHLAVHQRVHTGEKPYKCNECGKAFNWGSLLTVHQRIHTGEKPYKCNVCGKVFNYGGYLSVHMRCHTGEKPLHCNKCGMVFTYYSCLARHQRMHTGEKPYKCNVCGKVFIDSGNLSIHRRSHTGEKPFQCNECGKVFSYYSCLARHRKIHTGEKPYKCNDCGKAYTQRSSLTKHLVIHTGENPYHCNEFGEAFIQSSKLARYHRNPTGEKPHKCSECGRTFSHKTSLVYHQRRHTGEMPYKCIECGKVFNSTTTLARHRRIHTGEKPYKCNECGKVFRYRSGLARHWSIHTGEKPYKCNECGKAFRVRSILLNHQMMHTGEKPYKCNECGKAFIERSNLVYHQRNHTGEKPYKCMECGKAFGRRSCLTKHQRIHSSEKPYKCNECGKSYISRSGLTKHQIKHAGENLTTKLNVERPLDVVLTSGIPK

SEQ ID NO: 16459 - protein, 348 aa, Homo Sapiens
MRSLPFALTVESVSARAPTCCSTGRFTQGRQPCKCKACGRGFTQSASLLQHWRVHSDWRETLSLSPVRQDLLWPLQPHQAPASPLGRSHSSAGVRQGFSGQLCCWLTKEHTLAEALRLSPVPAGFWGPVEADRPPANSHRRVCPFCCCSCGDSVNEKTSLSQRVLPHPGEKTCRGGSVESVSLAPSSVAPDSTSGLRPCGSPGSFLQHLPPSTLLPRPPFLYPGPPLSLQPLVPSGLPAVPAVPLGGLEVAQVPPATQPAAQQEGAMGPRSCASAGRDSREAVQAPGYPEPARKASQHRAAGPLGEARARLQRQCRAPPPPSNPHWRGALPVFPVWKASSRRSNLARH

SEQ ID NO: 16460 - protein, 666 aa, Homo Sapiens
MDLVAFEDVAVNFTQEEWSLLDPSQKNLYREVMQETLRNLASIGEKWKDQNIEDQYKNPRNNLRSLLGERVDENTEENHCGETSSQIPDDTLNKKTSPGVKSCESSVCGEVFVGHSSLNRHIRADTAHKPSEYQEYGQEPYKCQQRKKAFRCHPSFQMQEKAHTGEKLYDCKECGKTFISHSSIQRHMIMHNGDGTYKCKFCGKACPCLSIYLIHERVHTGEKPYKCKQCGKAFSYSTSLQIHERTHTGEKPYECKECGKAFGSPNSLYEHRRTHTGEKPYECKQCGKAFRWFHSFQIHERTHSEEKAYECTKCGKAFKCPSYLCRHEVTHSGKKPCECKQCGKALSYLNFQRHMKMHTRMRPYKCKTVEKPLILPVRFEDMKELTLERNLMNASTVVKPSIVPVPFTIMKGLTLERNPMNVSSVVKPSFLPLPFDIMKGLTLERNRMSVSNVGKPSDLPHTFKCMEGLTLKRNPMNVSSVVKPSFFPLPFDIMKGLTLERNPMSVSNVGKPSHLPHTFKCMKGLTLESNCMNLNNVKKPLDLSETFKFMKRHTLERNPIRNMEKHSTISLPFKYMQQCTEDRMPMNVKSVTKHSYLPRSFEYMQEHTLERNPMNVRNAEKRSIIFLLCVYTKGCTLERNHINVRIVGKHSVCLVPFVDIKGLTLE

SEQ ID NO: 16461 - protein, 970 aa, Homo Sapiens
MALSQGLLTFRDVAIEFSQEEWKCLDPAQRTLYRDVMLENYRNLVSLDISSKCMMKEFSSTAQGNTEVIHTGTLQRHERHHIGDFCFQEMEKDIHDFEFQWKEDERNSHEAPMTEIKQLTGSTNRHDQRHAGNKPIKDQLGSSFHSHLPELHMFQTEGKIGNQVEKSINSASLVSTSQRISCRPKTHISKNYGNNFLNSSLLTQKQEVHMREKSFQCNESGKAFNYSSVLRKHQIIHLGAKQYKCDVCGKVFNQKRYLACHRRCHTGKKPYKCNDCGKTFSQELTLTCHHRLHTGEKHYKCSECGKTFSRNSALVIHKAIHTGEKSYKCNECGKTFSQTSYLVYHRRLHTGEKPYKCEECDKAFSFKSNLERHRKIHTGEKPYKCNECSRTFSRKSSLTRHRRLHTGEKPYKCNDCGKTFSQMSSLVYHRRLHTGEKPYKCEECDEAFSFKSNLERHRRIHTGEKPYKCNDCGKTFSQTSSLVYHRRLHTGEKPYKCEECDEAFSFKSNLERHRIIHTGEKLYKCNECGKTFSRKSSLTRHCRLHTGEKPYQCNECGKAFRGQSALIYHQAIHGIGKLYKCNDCHQVFSNATTIANHWRIHNEERSYKCNRCGKFFRHRSYLAVHWRTHSGEKPYKCEECDEAFSFKSNLQRHRRIHTGEKPYRCNECGKTFSRKSYLTCHRRLHTGEKPYKCNECGKTFGRNSALIIHKAIHTGEKPYKCNECGKAFSQKSSLTCHLRLHTGEKPYKCEECDKVFSRKSSLEKHRRIHTGEKPYKCKVCDKAFGRDSHLAQHTRIHTGEKPYKCNECGKNFRHNSALVIHKAIHSGEKPYKCNECGKTFRHNSALEIHKAIHTGEKPYKCSECGKVFNRKANLSRHHRLHTGEKPYKCNKCGKVFNQQAHLACHHRIHTGEKPYKCNECGKTFRHNSVLVIHKTIHTGEKPYKCNECGKVFNRKAKLARHHRIHTGKKH

SEQ ID NO: 16462 - protein, 533 aa, Homo Sapiens
MDSSQHLVTFEDVAVDFTQEEWTLLDQAQRDLYRDVMLENYKNLIILAGSELFKRSLMSGLEQMEELRTGVTGVLQELDLQLKTKGSPLLQDISAERSPNGVQLERSNTAEKLYDSNHSGKVFNEHPFLMTHMITHIGEKTSEDNQSGKALRKNFPHSFYKKSHAEGKMPKCVKHEKAFNQFPNLTRQNKTHTQEKLCECKDCWRTFLNQSSLKLHIRSHNGDKHYVCKECGKAFSNSSHLIGHGRIHSGEKPYVCKECGKAFTQSTGLKLHIRTHSGEKPYKCKECGKAFTHSSYLTDHTRIHSGKKPYVCMECGKAFTRSTGLILHMRIHTGEKPYECKECGKAFIHSSYLTKHVRIHSGEKLYLCKACGKAFTRSSGLVLHMRTHTGEKPYECKECGKAFNNSSMLSQHVRIHTGEKPYECKECGKAFTQSSGLSTHLRTHTGEKACECKECGKAFARSTNLNMHMRTHTGEKPYACKECGKAFRYSTYLNVHTRTHTGAKPYECKKCGKNFTQSSALAKHLRTKACEKT

SEQ ID NO: 16463 - protein, 595 aa, Homo Sapiens
MGPLTFRDVAIEFSLKEWQCLDTAQRNLYRNVMLENYRNLVFLGITVSKPDLITCLEQGKEAWSMKRHEIMVAKPTVMCSHFAQDLWPEQNIKDSFQKVTLKRYGKCRHENLPLRKGCESMDECKMHKGGCNGLNQCLTATQSKIFQCDKYVKVAHKFSNSNRHEIRHTKKKPFKCTKCGKSFGMISCLTEHSRIHTRVNFYKCEECGKAFNWSSTLTKHKRIHTGEKPYKCEECGKAFNQSSNLIKHKKIHTGEKPYKCEECGKTFNRFSTLTTHKIIHTGEKPYKCKECGKAFNRSSTLTTHRKIHTGEKPYKCEECGKAFKQSSNLTTHKIIHTGEKPYKCKKCGKAFNQSAHLTTHEVIHTGEKPYKCEKCGKAFNHFSHLTTHKIIHTGEKPYKCKECGKAFKHSSTLTKHKIIHTGEKPYKCKECEKAFNQSSKLTEHKKIHTGEKPYECEKCGKAFNQSSNLTRHKKSHTEEKPYKCEECGKGFKWPSTLTIHKIIHTGEKPYKCEECGKAFNQSSKLTKHKKIHTGEKPYTCEECGKAFNQSSNLTKHKRIHTGEKPYKCEECDKAFKWSSVLTKHKIIHTGEKLQI

SEQ ID NO: 16464 - protein, 659 aa, Homo Sapiens
MLHQPTPGNRGLTARMEVGPATETFVLELQCLEDGGPGPDTLSGGSGGSESQEEEEPQERNSSPQRPAVSAPVGASEIAEETRPGQRELQLQQLEQQPEPQQQPQHEQLQQPQPHLELQQQPQQDGQQQLSQLQQEKHQSVHHQELKPELQLMHQQQQLQPQQVQEQQRLQQQQEQLQTQQAQEQQVLQQQEQLQQQVQEQQLLQQQQEQLQQQQLLQQQEQLQQQQFQQQQEQLQQQQQLLLLQQQGQLQQQLLQQQQAQLQQQLLEQQQAQLQQQLLLQQQEQLQQQQQQQLLQQQQEQLQQQQLQPPPLEPEEEEEVELELMPVDLGSEQELEQQRQELERQQELERQQEQRQLQLKLQEELQQLEQQLEQQQQQLEQQEVQLELTPVELGAQQQEVQLELTPVQPELQLELVPAAGGGGAAVPGAPAAVVVAPPGYVVVQELMVLPAVAAPAVVAIPGPAGSAALTPARQRRRRRARDRPTICGECGKGFSRSTDLVRHQATHTGERPHRCGECGKGFSQHSNLVTHQRIHTGEKPYACSYCAKRFSESSALVQHQRTHTGERPYACGDCGKRFSVSSNLLRHRRTHSGERPYVCEDCGERFRHKVQIRRHERQLHGAGRSRGLGLLRASRPAALGGPARAEQAATATAPADKAL

SEQ ID NO: 16465 - protein, 632 aa, Homo Sapiens
MLREEAAQKRKEKEPGMALPQGHLTFRDVAIEFSLEEWKCLDPTQRALYRAMMLENYRNLHSVDISSKCMMKKFSSTAQGNTEVDTGTLERHESHHIGDFCFQKIGKDIHDFEFQWQEDKRNSHEATMTQIKKLTGSTDRYDRRHPGNKPIKDQLGLSFHSHLPELHIFQTKGKVGNQVEKSINDASSVLTSQRISSRPKIHISNNYENNFFHSSLLTLKQEVHIREKSFQCNESGKAFNCSSLLRKHQIIYLGGKQYKCDVCGKVFNQKRYLACHHRCHTGEKPYKCNECGKVFNQQSNLASHHRLHTGEKPYKCEECDKVFSRKSNLERHRRIHTGEKPYKCKVCEKAFRRDSHLTQHTRIHTGEKPYKCNECGKAFSGQSTLIHHQAIHGIGKLYKCNDCHKVFSNATTIANHWRIHNEERSYKCNKCGKFFRRRSYLVVHWRTHTGEKPYKCNECGKTFHHNSALVIHKAIHTGEKPYKCNECGKTFRHNSALVIHKAIHTGEKPYKCNECGKVFNQQATLARHHRLHTGEKPYKCEECDTVFSRKSHHETHKRIHTGEKPYKCDDFDEAFSQASSYAKQRRIHMGEKHHKCDDCGKAFTSHSHRIRHQRIHTGQKSYKCHKRGKVFS

SEQ ID NO: 16466 - protein, 203 aa, Homo Sapiens
MHTGEKPYTCEECVKLLTNPQALLYTGAFILNKNFTNVKNAAKPLLNPHPLINKRIHTGEKPYTCEECGKAFYRSSHLTEHKNIHTGEKSYKCEECGNAFYRSSHLTKHKRIHSGQKPYKCEECGKAFRQSSALNEHKKIHTAEKPYKCKECGKAFRWSRSLNEHTNIHIGEKPYTCEECGKDFTWSSTLTVHQRIQTGEKHS

SEQ ID NO: 16467 - protein, 531 aa, Homo Sapiens
MDSVAFEDVAVNFTQEEWALLDPSQKNLYREVMQETLRNLTSIGKKWNNQYIEDEHQNPRRNLRRLIGERLSESKESHQHGEVLTQVPDDTLKKKTPGVQSYESSVCGEIGIGLSSLNRHLRAFSYSSSLAIHGRTHTGEKPYECKECGKAFRFPSSVRRHERIHSAKKPYECKQCGKAFSFPSSVRRHERIHSAKKPYECKQCGKALSYLVSFQTHMRMHTGERPHKCNICGKAFFSPSSLKRHEKSHTGEKRYKCKQCDKAFNCPSSFQYHERTHSGEKPYECTQCRKAFRSVKYLRVHERKHTGEKPYECKLCGKGFISSTSFRYHEKTHTGEKPYECKKCVKAFSFVKDLRIHERTHTGEKPFECKQCGKTFTSSNSFHYHERTHTGEKPYECKQCGKAFRSASVLQKHIRTHTGEKPYGCKQCGKVFRVASQLKMHERTHTGEKPYECKQCGKAFISSNSIRYHKRTHTGEKPYKCKQCGKAFISSNSFLYHERIHTGEKPYECKQCGKAFRSASILQKHVRTHAG

SEQ ID NO: 16468 - protein, 563 aa, Homo Sapiens
MARRLLPAHVQESVTFRDVAVFFSQDEWLHLDSAQRALYREVMLENYSILVSLGILFSKPKVISQLEQGEDPWMVESGVPQGAHLGWESLFGTIVSKEENQEVMKKLIIDGTFDFKLEKTYINEDKLEKQQGKKNRLFSKVLVTIKKVYMKERSFKGVEFGKNLGLKSSLIRKPRIVSRGRRPRSQQYSVLFKQLGVNTVRKCYKCNICGKIFLHSSSLSKHQRIHTGEKLYKCKECRKAFSQSSSLTQHLRVHTGEKPYICSECGKAFSFTTSLIGHQRMHTGERPYKCKECGKTFKGSSSLNNHQRIHTGEKPYKCNECGRAFSQCSSLIQHHRIHTGEKPYECTQCGKAFTSISRLSRHHRIHTGEKPFHCNECGKVFSYHSALIIHQRIHTGEKPYACKECGKAFSQSSALIQHQRIHTGEKPYKCNECGKAFSWISRLNIHHRIHTGEKPYNCKECGKAFSSHSGVNTHRKIHTGEKPYKCNDCEKAFNQSSALIQHQRIHTGEKPYNCKVCGKAFRQSSSLMTHMRIHTGEKPYKCKECGKAFSQSSSLTNHQRTHN

SEQ ID NO: 16469 - protein, 577 aa, Homo Sapiens
MLRRGHLAFRDVAIEFPQEEWKCLDPAQRTLYREVMVENYRNLVFLGICLPDLSVISMLEQRRDPRNLQSEVKIANNPGGRECIKGVNAESSSKLGSNAGNKSLKNQLGLTFQLHLSELQLFQAERNISGCKHVEKPINNSLVSPLQKIYSSVKSHILNKYRNDFDDSPFLPQEQKAQIREKPCECNEHGKAFRVSSRLANNQVIHTADNPYKCNECDKVFSNSSNLVQHQRIHTGEKPYKCHECGKLFNRISLLARHQRIHTGEKPYKCHECGKVFTQNSHLANHHRIHTGEKPYKCNECGKVFNRNAHLARHQKIHSGEKPYKCKECGKAFSGGSGLTAHLVIHTGEKLYKCNKCGKVFNRNAHLTRHQRIHTGEKPYECKECGKVFRHKFCLTNHHRMHTGEQPYKCNECGKAFRDCSGLTAHLLIHTGEKPYKCKECAKVFRHRLSLSNHQRFHTGEKPYRCDECGKDFTRNSNLANHHRIHTGEKPYKCSECHKVFSHNSHLARHRQIHTGEKSYKCNECGKVFSHKLYLKKHERIHTGEKPYRCHECGKDFTRNSNLANHHRIHTGEKPYR

SEQ ID NO: 16470 - protein, 544 aa, Homo Sapiens
MAVMDLSSPWALTKQDSACFHLRNAEEERMIAVFLTTWLQEPMTFKDVAVEFTQEEWMMLDSAQRSLYRDVMLENYRNLTSVEYQLYRLTVISPLDQEEIRNMKKRIPQAICPDQKIQPKTKESTVQKILWEEPSNAVKMIKLTMHNWSSTLREDWECHKIRKQHKIPGGHWRQMIYAPKKTVPQELFRDYHELEENSKLGSKLIFSQSIFTSKHCQKCYSEIGCLKHNSIINNYVKNSISEKLYESHECDTTLWHFQRNQTVQKEYTYSKHGMHFTHNMFPVPNNLHMAQNACECNKDETLCHQSSLKKQGQTHTEKKHECNQCGKAFKRISNLTLYKKSHMGEKQYECKECGKVFNDSSTLRRHVRTHTGEKPYECNQCGKAFSQKTSLKAHMRTHTGEKPYECNQCGKSFGTSSYLIVHKRIHTGEKLYECSECGKAFNTSSHLKVHKKIHTGENVYECSDCGKVFSGVSSLRMHIRTHTGEKPYECKECRKAFSVSSSLRRHVRIHTGEKPYECIQCGKAFSQSSSLIIHKRIHTERETL

SEQ ID NO: 16471 - protein, 601 aa, Homo Sapiens
MGPLEFRDVAIEFSLEEWHCLDTAQQNLYRDVMLENYRHLVFLGIVVTKPDLITCLEQGKKPFTVKRHEMIAKSPVMCFHFAQDLCPEQSLKDSFQKVIVTRYEKREYGNLELKKGCESVDEGKVHKRGYNGLNQCLTATQSKVFQCDTYVKVSHIFSNSNRHKIRDTGKKPFKCIECGKAFNQSSTLATHKKIHTGEITCKCEECGKAFNRSSHLTSHKRIHTGEKRYKCEDCGKELKYSSTLTAHKRIHTGEKRYKCEDCGKELKYSSTLTAHKRIHTGEKPYKCDKCGRAFISSSILYVHKISHTEEKPYKCEECGKAFKLSSILSTHKRIHTGEKPYKCEECGKAFRRSLVLRTHKRIHTGEKPYKCDKCGKAFISSSLLYKHKISHSEKKPYKCEECGKAFKRSSTLTIHKISHTEEKPYKCQECDKVFKRSSALSTHKIIHSGEKPYKCEECGKAFKRSSNLTTHKISHTEEKLYKCQECDKAFKYSSALSTHKIIHSGENPYKCEECGKAFKRSSVLSKHKIIHTGAKPYKCEECGKAFKRSSQLTSHKISHTGEKPYKCEECGKAFNLSSDLNTHKRIHIGQKAYIVKNMANL

SEQ ID NO: 16472 - protein, 1191 aa, Homo Sapiens
MPGTPGSLEMGLLTFRDVAIEFSPEEWQCLDTAQQNLYRNVMLENYRNLAFLGIALSKPDLITYLEQGKEPWNMKQHEMVDEPTGICPHFPQDFWPEQSMEDSFQKVLLRKYEKCGHENLQLRKGCKSVDECKVHKEGYNKLNQCLTTAQSKVFQCGKYLKVFYKFLNSNRHTIRHTGKKCFKCKKCVKSFCIRLHKTQHKCVYITEKSCKCKECEKTFHWSSTLTNHKEIHTEDKPYKCEECGKAFKQLSTLTTHKIICAKEKIYKCEECGKAFLWSSTLTRHKRIHTGEKPYKCEECGKAFSHSSTLAKHKRIHTGEKPYKCEECGKAFSRSSTLAKHKRIHTGEKPYKCKECGKAFSNSSTLANHKITHTEEKPYKCKECDKAFKRLSTLTKHKIIHAGEKLYKCEECGKAFNRSSNLTIHKFIHTGEKPYKCEECGKAFNWSSSLTKHKRFHTREKPFKCKECGKAFIWSSTLTRHKRIHTGEKPYKCEECGKAFRQSSTLTKHKIIHTGEKPYKFEECGKAFRQSLTLNKHKIIHSREKPYKCKECGKAFKQFSTLTTHKIIHAGKKLYKCEECGKAFNHSSSLSTHKIIHTGEKSYKCEECGKAFLWSSTLRRHKRIHTGEKPYKCEECGKAFSHSSALAKHKRIHTGEKPYKCKECGKAFSNSSTLANHKITHTEEKPYKCKECDKTFKRLSTLTKHKIIHAGEKLYKCEECGKAFNRSSNLTIHKFIHTGEKPYKCEECGKAFNWSSSLTKHKRIHTREKPFKCKECGKAFIWSSTLTRHKRIHTGEKPYKCEECGKAFSRSSTLTKHKTIHTGEKPYKCKECGKAFKHSSALAKHKIIHAGEKLYKCEECGKAFNQSSNLTTHKIIHTKEKPSKSEECDKAFIWSSTLTEHKRIHTREKTYKCEECGKAFSQPSHLTTHKRMHTGEKPYKCEECGKAFSQSSTLTTHKIIHTGEKPYKCEECGKAFRKSSTLTEHKIIHTGEKPYKCEECGKAFSQSSTLTRHTRMHTGEKPYKCEECGKAFNRSSKLTTHKIIHTGEKPYKCEECGKAFISSSTLNGHKRIHTREKPYKCEECGKAFSQSSTLTRHKRLHTGEKPYKCGECGKAFKESSALTKHKIIHTGEKPYKCEKCGKAFNQSSILTNHKKIHTITPVIPLLWEAEAGGSRGQEMETILANTVKPLLY

SEQ ID NO: 16473 - protein, 586 aa, Homo Sapiens
MGPLTFRDVKIEFSLEEWQCLDTAQRNLYRDVMLENYRNLVFLGIAVSKPDLITWLEQGKEPWNLKRHEMVDKTPVMCSHFAQDVWPEHSIKDSFQKVILRTYGKYGHENLQLRKDHKSVDACKVYKGGYNGLNQCLTTTDSKIFQCDKYVKVFHKFPNVNRNKIRHTGKKPFKCKNRGKSFCMLSQLTQHKKIHTREYSYKCEECGKAFNWSSTLTKHKIIHTGEKPYKCEECGKAFNRSSNLTKHKIIHTGEKPYKCEECGKAFNRSSTLTKHKRIHTEEKPYKCEECGKAFNQFSILNKHKRIHMEDKPYKCEECGKAFRVFSILKKHKIIHTGEKPYKCEECGKAFNQFSNLTKHKIIHTGEKPYKCDECGKAFNQSSTLTKHKRIHTGEKPYKCEECGKAFKQSSTLTEHKIIHTGEKPYKCEKCGKAFSWSSAFTKHKRNHMEDKPYKCEECGKAFSVFSTLTKHKIIHTREKPYKCEECGKAFNQSSIFTKHKIIHTEGKSYKCEKCGNAFNQSSNLTARKIIYTGEKPYKYEECDKAFNKFSTLITHQIIYTGEKPCKHECGRAFNKSSNYTKEKLQT

SEQ ID NO: 16474 - protein, 620 aa, Homo Sapiens
MGPLQFRDVAIEFSLEEWHCLDTAQRNLYRNVMLENYSNLVFLGIVVSKPDLIAHLEQGKKPLTMKRHEMVANPSVICSHFAQDLWPEQNIKDSFQKVILRRYEKRGHGNLQLIKRCESVDECKVHTGGYNGLNQCSTTTQSKVFQCDKYGKVFHKFSNSNRHNIRHTEKKPFKCIECGKAFNQFSTLITHKKIHTGEKPYICEECGKAFKYSSALNTHKRIHTGEKPYKCDKCDKAFIASSTLSKHEIIHTGKKPYKCEECGKAFNQSSTLTKHKKIHTGEKPYKCEECGKAFNQSSTLTKHKKIHTGEKPYVCEECGKAFKYSRILTTHKRIHTGEKPYKCNKCGKAFIASSTLSRHEFIHMGKKHYKCEECGKAFIWSSVLTRHKRVHTGEKPYKCEECGKAFKYSSTLSSHKRSHTGEKPYKCEECGKAFVASSTLSKHEIIHTGKKPYKCEECGKAFNQSSSLTKHKKIHTGEKPYKCEECGKAFNQSSSLTKHKKIHTGEKPYKCEECGKAFNQSSTLIKHKKIHTREKPYKCEECGKAFHLSTHLTTHKILHTGEKPYRCRECGKAFNHSATLSSHKKIHSGEKPYECDKCGKAFISPSSLSRHEIIHTGEKP

SEQ ID NO: 16475 - protein, 572 aa, Homo Sapiens; identical to SEQ ID NO: 14458

SEQ ID NO: 16476 - protein, 864 aa, Homo Sapiens
MGSLTFWDVTIEFALEEWQCLDMAQQNLYRNVMLENYRNLVFLGIAVSKLDLITCLKQGKEPWNMKRHEMVTKPPVISSHFTQDFWPDQSIKDSFQEIILRTYARCGHKNLRLRKDCESVNEGKMHEEAYNKLNQCWTTTQGKIFQCNKYVKVFHKYSNSNRYKIRHTKKKTFKCMKCSKSFFMLSHLIQHKRIHTRENIYKCEERGKAFKWFSTLIKHKIIHTEDKPYKYKKCGKAFNISSMFTKCKIIHTGKKPCKCEECGKVFNNSSTLMKHKIIHTGKKPYKCEECGKAFKQSSHLTRHKAIHTGEKPYKCEECGKAFNHFSALRKHQIIHTGKKPYKCEECGKAFSQSSTLRKHEIIHTEEKPYKYEECGKAFSNLSALRKHEIIHTGQKPYKCEECGKAFKWSSKLTVHKVIHTAEKPCKCEECGKAFKRFSALRKHKIIHTGKQPYKCEECSKAFSNFSALRKHEIIHTGEKPYKCEECGKAFKWSSKLTVHKVIHMEEKPCKCEECGKAFKHFSALRKHKIIHTGKKPYKCEECGKAFNNSSTLMKHKIIHTGKKPYKCEECGKAFKQSSHLTRHKAIHTGEKPYKCEECGKAFNHFSALRKHQIIHTGKKPYKCEECGKAFSQSSTLRKHEIIHTGEKPYKCEECGKAFKWSSHLTRHKVIHTEEKPYKCEECGKAFNHFSALRKHKIIHTGKKPYKCEECGKAFSQSSTLRKHEIIHTGEKPYKCEECGKAFKWSSKLTVHKVIHTAEKPCKCEECGKAFKHFSALRKHKIIHTGKKPYKCEECGKAFNNSSTLRKHEIIHTGEKSYKCEECGKAFQWSSKLTLHKVIHMERNPANVKNVAKLLNISQPLENMR

SEQ ID NO: 16477 - protein, 1918 aa, Homo Sapiens
MEERRPHLDARPRNSHTNHRGPVDGELPPRARNQANNPPANALRGGASHPGRHPRANNHPAAYWQREERFRAMGRNPHQGRRNQEGHASDEARDQRHDQENDTRWRNGNQDCRNRRPPWSNDNFQQWRTPHQKPTEQPQQAKKLGYKFLESLLQKDPSEVVITLATSLGLKELLSHSSMKSNFLELICQVLRKACSSKMDRQSVLHVLGILKNSKFLKVCLPAYVVGMITEPIPDIRNQYPEHISNIISLLQDLVSVFPASSVQETSMLVSLLPTSLNALRASGVDIEEETEKNLEKVQTIIEHLQEKRREGTLRVDTYTLVQPEAEDHVESYRTMPIYPTYNEVHLDERPFLRPNIISGKYDSTAIYLDTHFRLLREDFVRPLREGILELLQSFEDQGLRKRKFDDIRIYFDTRIITPMCSSSGIVYKVQFDTKPLKFVRWQNSKRLLYGSLVCMSKDNFETFLFATVSNREQEDLCRGIVQLCFNEQSQQLLAEVQPSDSFLMVETTAYFEAYRHVLEGLQEVQEEDVPFQRNIVECNSHVKEPRYLLMGGRYDFTPLIENPSATGEFLRNVEGLRHPRINVLDPGQWPSKEALKLDDSQMEALQFALTRELAIIQGPPGTGKTYVGLKIVQALLTNESVWQISLQKFPILVVCYTNHALDQFLEGIYNCQKTSIVRVGGRSNSEILKQFTLRELRNKREFRRNLPMHLRRAYMSIMTQMKESEQELHEGAKTLECTMRGVLREQYLQKYISPQHWESLMNGPVQDSEWICFQHWKHSMMLEWLGLGVGSFTQSVSPAGPENTAQAEGDEEEEGEEESSLIEIAEEADLIQADRVIEEEEVVRPQRRKKEESGADQELAKMLLAMRLDHCGTGTAAGQEQATGEWQTQRNQKKKMKKRVKDELRKLNTMTAAEANEIEDVWQLDLSSRWQLYRLWLQLYQADTRRKILSYERQYRTSAERMAELRLQEDLHILKDAQVVGMTTTGAAKYRQILQKVEPRIVIVEEAAEVLEAHTIATLSKACQHLILIGDHQQLRPSANVYDLAKNFNLEVSLFERLVKVNIPFVRLNYQHRMCPEIARLLTPHIYQDLENHPSVLKYEKIKGVSSNLFFVEHNFPEQEIQEGKSHQNQHEAHFVVELCKYFLCQEYLPSQITILTTYTGQLFCLRKLMPAKTFAGVRVHVVDKYQGEENDIILLSLVRSNQEGKVGFLQISNRICVALSRAKKGMYCIGNMQMLAKVPLWSKIIHTLRENNQIGPMLRLCCQNHPETHTLVSKASDFQKVPEGGCSLPCEFRLGCGHVCTRACHPYDSSHKEFQCMKPCQKVICQEGHRCPLVCFQECQPCQVKVPKTIPRCGHEQMVPCSVPESDFCCQEPCSKSLRCGHRCSHPCGEDCVQLCSEMVTIKLKCGHSQPVKCGHVEGLLYGGLLVKCTTKCGTILDCGHPCPGSCHSCFEGRFHERCQQPCKRLLICSHKCQEPCIGECPPCQRTCQNRCVHSQCKKKCGELCSPCVEPCVWRCQHYQCTKLCSEPCNRPPCYVPCTKLLVCGHPCIGLCGEPCPKKCRICHMDEVTQIFFGFEDEPDARFVQLEDCSHIFEVQALDRYMNEQKDDEVAIRLKVCPICQVPIRKNLRYGTSIKQRLEEIEIIKEKIQGSAGEIATSQERLKALLERKSLLHQLLPEDFLMLKEKLAQKNLSVKDLGLVENYISFYDHLASLWDSLKKMHVLEEKRVRTRLEQVHEWLAKKRLSFTSQELSDLRSEIQRLTYLVNLLTRYKIAEKKVKDSIAVEVYSVQNILEKTCKFTQEDEQLVQEKMEALKATLPCSGLGISEEERVQIVSAIGYPRGHWFKCRNGHIYVIGDCGGAMERGTCPDCKEVIGGTNHTLERSNQLASEMDGAQHAAWSDTANNLMNFEEIQGMM

SEQ ID NO: 16478 - protein, 408 aa, Homo Sapiens
MLPRPKAPASPRRPQTPTPSEQDADPGPASPRDTEAQRLRFRQFQYHVASGPHLALGQLWTLCRQWLRPEARSKEQMLELLVLEQFLGALPSKMRTWVQSQGPRSCREAASLVEDLTQMCQQEVLVSLDSVEPQDWSFGEEEDGKSPRSQKEPSQASELILDAVAAAPALPEESEWLETTQLQQSLHTRAEAEAPRAPGLLGSRARLPLKPSIWDEPEDLLAGPSSDLRAEGTVISSPKGPSAQRISPRRRNRNTDQSGRHQPSLKHTKGGTQEAVAGISVVPRGPRGGRPFQCADCGMVFTWVTHFIEHQKTHREEGPFPCPECGKVFLHNSVLTEHGKIHLLEPPRKKAPRSKGPRESVPPRDGAQGPVAPRSPKRPFQCSVCGKAFPWMVHLIDHQKLHTAHGHM

SEQ ID NO: 16479 - protein, 725 aa, Homo Sapiens
MGPRASLSRLRELCGHWLRPALHTKKQILELLVLEQFLSVLPPHLLGRLQGQPLRDGEEVVLLLEGIHREPSHAGPLDFSCNAGKSCPRADVTLEEKGCASQVPSHSPKKELPAEEPSVLGPSDEPPRPQPRAAQPAEPGQWRLPPSSKQPLSPGPQKTFQALQESSPQGPSPWPEESSRDQELAAVLECLTFEDVPENKAWPAHPLGFGSRTPDKEEFKQEEPKGAAWPTPILAESQADSPGVPGEPCAQSLGRGAAASGPGEDGSLLGSSEILEVKVAEGVPEPNPELQFICADCGVSFPQLSRLKAHQLRSHPAGRSFLCLCCGKSFGRSSILKLHMRTHTDERPHACHLCGHRFRQSSHLSKHLLTHSSEPAFLCAECGRGFQRRASLVQHLLAHAQDQKPPCAPESKAEAPPLTDVLCSHCGQSFQRRSSLKRHLRIHARDKDRRSSEGSGSRRRDSDRRPFVCSDCGKAFRRSEHLVAHRRVHTGERPFSCQACGRSFTQSSQLVSHQRVHTGEKPYACPQCGKRFVRRASLARHLLTHGGPRPHHCTQCGKSFGQTQDLARHQRSHTGEKPCRCSECGEGFSQSAHLARHQRIHTGEKPHACDTCGHRFRNSSNLARHRRSHTGERPYSCQTCGRSFRRNAHLRRHLATHAEPGQEQAEPPQECVECGKSFSRSCNLLRHLLVHTGARPYSCTQCGRSFSRNSHLLRHLRTHARETLY

SEQ ID NO: 16480 - protein, 604 aa, Homo Sapiens
MASTWAIQAHMDQDEPLEVKIEEEKYTTRQDWDLRKNNTHSREVFRQYFRQFCYQETSGPREALSRLRELCHQWLRPETHTKEQILELLVLEQFLTILPEELQAWVQEQHPESGEEVVTVLEDLERELDEPGEQVSVHTGEQEMFLQETVRLRKEGEPSMSLQSMKAQPKYESPELESQQEQVLDVETGNEYGNLKQEVSEEMEPHGKTSSKFENDMSKSARCGETREPEEITEEPSACSREDKQPTCDENGVSLTENSDHTEHQRICPGEESYGCDDCGKAFSQHSHLIEHQRIHTGDRPYKCEECGKAFRGRTVLIRHKIIHTGEKPYKCNECGKAFGRWSALNQHQRLHTGEKHYHCNDCGKAFSQKAGLFHHIKIHTRDKPYQCTQCNKSFSRRSILTQHQGVHTGAKPYECNECGKAFVYNSSLVSHQEIHHKEKCYQCKECGKSFSQSGLIQHQRIHTGEKPYKCDVCEKAFIQRTSLTEHQRIHTGERPYKCDKCGKAFTQRSVLTEHQRIHTGERPYKCDECGNAFRGITSLIQHQRIHTGEKPYQCDECGKAFRQRKKTSYKEILLKNHSEPQAGVNLLLSSLIPEWQSCFRRDL

SEQ ID NO: 16481 - protein, 348 aa, Homo Sapiens
MTTALEPEDQKGLLIIKAEDHYWGQDSSSQKCSPHRRELYRQHFRKLCYQDAPGPREALTQLWELCRQWLRPECHTKEQILDLLVLEQFLSILPKDLQAWVRAHHPETGEEAVTVLEDLERELDEPGKQVPGNSERRDILMDKLAPLGRPYESLTVQLHPKKTQLEQEAGKPQRNGDKTRTKNEELFQKEDMPKDKEFLGEINDRLNKDTPQHPKSKDIIENEGRSEWQQRERRRYKCDECGKSFSHSSDLSKHRRTHTGEKPYKCDECGKAFIQRSHLIGHHRVHTGVKPYKCKECGKDFSGRTGLIQHQRIHTGEKPYECDECGRPFRVSSALIRHQRIHTANKLY

SEQ ID NO: 16482 - protein, 510 aa, Homo Sapiens
MLPLEKAFASPRSSPAPPDLPTPGSAAGVQQEEPETIPERTPADLEFSRLRFREFVYQEAAGPHQTLARLHELCRQWLMPEARSKEQMLELLVLEQFLGILPDKVRPWVVAQYPESCKKAASLVEGLADVLEEPGMLLGSPAGSSSILSDGVYERHMDPLLLPGELASPSQALGAGEIPAPSETPWLSPDPLFLEQRRVREAKTEEDGPANTEQKLKSFPEDPQHLGEWGHLDPAEENLKSYRKLLLWGYQLSQPDAASRLDTEELRLVERDPQGSSLPEGGRRQESAGCACEEAAPAGVLPELPTEAPPGDALADPPSGTTEEEEEQPGKAPDPQDPQDAESDSATGSQRQSVIQQPAPDRGTAKLGTKRPHPEDGDGQSLEGVSSSGDSAGLEAGQGPGADEPGLSRGKPYACGECGEAFAWLSHLMEHHSSHGGRKRYACQGCWKTFHFSLALAEHQKTHEKEKSYALGGARGPQPSTREAQAGARAGGPPESVEGEAPPAPPEAQR

SEQ ID NO: 16483 - protein, 614 aa, Homo Sapiens
MMAADIPRVTTPLSSLVQVPQEEDRQEEEVTTMILEDDSWVQEAVLQEDGPESEPFPQSAGKGGPQEEVTRGPQGALGRLRELCRRWLRPEVHTKEQMLTMLPKEIQAWLQEHRPESSEEAAALVEDLTQTLQDSDFEIQSENGENCNQDMFENESRKIFSEMPEGESAQHSDGESDFERDAGIQRLQGHSPGEDHGEVVSQDREVGQLIGLQGTYLGEKPYECPQCGKTFSRKSHLITHERTHTGEKYYKCDECGKSFSDGSNFSRHQTTHTGEKPYKCRDCGKSFSRSANLITHQRIHTGEKPFQCAECGKSFSRSPNLIAHQRTHTGEKPYSCPECGKSFGNRSSLNTHQGIHTGEKPYECKECGESFSYNSNLIRHQRIHTGEKPYKCTDCGQRFSQSSALITHRRTHTGEKPYQCSECGKSFSRSSNLATHRRTHMVEKPYKCGVCGKSFSQSSSLIAHQGMHTGEKPYECLTCGESFSWSSNLLKHQRIHTGEKPYKCSECGKCFSQRSQLVVHQRTHTGEKPYKCLMCGKSFSRGSILVMHQRAHLGDKPYRCPECGKGFSWNSVLIIHQRIHTGEKPYKCPECGKGFSNSSNFITHQRTHMKEKLY

SEQ ID NO: 16484 - protein, 1043 aa, Homo Sapiens
MAMALELQAQASPQPEPEELLIVKLEEDSWGSESKLWEKDRGSVSGPEASRQRFRQFQYRDAAGPHEAFSQLWALCCRWLRPEIRLKEQILELLVLEQFLTILPREVQTWVQARHPESGEEAVALVEDWHRETRTAGQSGLELHTEETRPLKTGEEAQSFQLQPVDPWPEGQSQKKGVKNTCPDLPNHLNAEVAPQPLKESAVLTPRVPTLPKMGSVGDWEVTAESQEALGPGKHAEKELCKDPPGDDCGNSVCLGVPVSKPSNTSEKEQGPEFWGLSLINSGKRSTADYSLDNEPAQALTWRDSRAWEEQYQWDVEDMKVSGVHWGYEETKTFLAILSESPFSEKLRTCHQNRQVYRAIAEQLRARGFLRTLEQCRYRVKNLLRNYRKAKSSHPPGTCPFYEELEALVRARTAIRATDGPGEAVALPRLGYSDAEMDEQEEGGWDPEEMAEDCNGAGLVNVESTQGPRIAGAPALFQSRIAGVHWGYEETKAFLAILSESPFSEKLRTCHQNSQVYRAIAERLCALGFLRTLEQCRYRFKNLLRSYRKAKSSHPPGTCPFYEELDSLMRARAAVRAMGTVREAAGLPRCGQSSAETDAQEAWGEVANEDAVKPSTLCPKAPDMGFEMRHEDEDQISEQDIFEGLPGALSKCPTEAVCQPLDWGEDSENENEDEGQWGNPSQEQWQESSSEEDLEKLIDHQGLYLAEKPYKCDTCMKSFSRSSHFIAHQRIHTGEKPYKCLECGKNFSDRSNLNTHQRIHTGEKPYKCLECGKSFSDHSNLITHQRIHTGEKPYKCGECWKSFNQSSNLLKHQRIHLGGNPDQCSEPGGNFAQSPSFSAHWRNSTEETAPEQPQSISKDLNSPGPHSTNSGEKLYECSECGRSFSKSSALISHQRIHTGEKPYECAECGKSFSKSSTLANHQRTHTGEKPYKCVDCGKCFSERSKLITHQRVHTGEKPYKCLECGKFFRDRSNLITHQRIHTGEKPYKCRECGKCFNQSSSLIIHQRIHTGEKPYKCTECGKDFNNSSHFSAHRRTHAGGKAS

SEQ ID NO: 16485 - protein, 473 aa, Homo Sapiens
MMTKVLGMAPVLGPRPPQEQVGPLMVKVEEKEEKGKYLPSLEMFRQRFRQFGYHDTPGPREALSQLRVLCCEWLRPEIHTKEQILELLVLEQFLTILPQELQAWVQEHCPESAEEAVTLLEDLERELDEPGHQVSTPPNEQKPVWEKISSSGTAKESPSSMQPQPLETSHKYESWGPLYIQESGEEQEFAQDPRKVRDCRLSTQHEESADEQKGSEAEGLKGDIISVIIANKPEASLERQCVNLENEKGTKPPLQEAGSKKGRESVPTKPTPGERRYICAECGKAFSNSSNLTKHRRTHTGEKPYVCTKCGKAFSHSSNLTLHYRTHLVDRPYDCKCGKAFGQSSDLLKHQRMHTEEAPYQCKDCGKAFSGKGSLIRHYRIHTGEKPYQCNECGKSFSQHAGLSSHQRLHTGEKPYKCKECGKAFNHSSNFNKHHRIHTGEKPYWCHHCGKTFCSKSNLSKHQRVHTGEGEAP

SEQ ID NO: 16486 - protein, 491 aa, Homo Sapiens
MAIPKHSLSPVPWEEDSFLQVKVEEEEEASLSQGGESSHDHIAHSEAARLRFRHFRYEEASGPHEALAHLRALCCQWLQPEAHSKEQILELLVLEQFLGALPPEIQAWVGAQSPKSGEEAAVLVEDLTQVLDKRGWDPGAEPTEASCKQSDLGESEPSNVTETLMGGVSLGPAFVKACEPEGSSERSGLSGEIWTKSVTQQIHFKKTSGPYKDVPTDQRGRESGASRNSSSAWPNLTSQEKPPSEDKFDLVDAYGTEPPYTYSGKRSSKCRECRKMFQSASALEAHQKTHSRKTPYACSECGKAFSRSTHLAQHQVVHTGAKPHECKECGKAFSRVTHLTQHQRIHTGEKPYKCGECGKTFSRSTHLTQHQRVHTGERPYECDACGKAFSQSTHLTQHQRIHTGEKPYKCDACGRAFSDCSALIRHLRIHSGEKPYQCKVCPKAFAQSSSLIEHQRIHTGEKPYKCSDCGKAFSRSSALMVHLRIHITVLQ

SEQ ID NO: 16487 - protein, 389 aa, Homo Sapiens
MAITLTLQTAEMQEGLLAVKVKEEEEEHSCGPESGLSRNNPHTREIFRRRFRQFCYQESPGPREALQRLQELCHQWLRPEMHTKEQILELLVLEQFLTILPEELQAWVRQHRPVSGEEAVTVLEDLERELDDPGEQVLSHAHEQEEFVKEKATPGAAQESSNDQFQTLEEQLGYNLREVCPVQEIDGKAGTWNVELAPKREISQEVKSLIQVLGKQNGNITQIPEYGDTCDREGRLEKQRVSSSVERPYICSECGKSFTQNSILIEHQRTHTGEKPYECDECGRAFSQRSGLFQHQRLHTGEKRYQCSVCGKAFSQNAGLFHHLRIHTGEKPYQCNQCNKSFSRRSVLIKHQRIHTGERPYECEECGKNFIYHCNLIQHRKVHPVAESS

SEQ ID NO: 16488 - protein, 544 aa, Homo Sapiens
MLKEHPEMAEAPQQQLGIPVVKLEKELPWGRGREDPSPETFRLRFRQFRYQEAAGPQEALRELQELCRRWLRPELHTKEQILELLVLEQFLTILPREFYAWIREHGPESGKALAAMVEDLTERALEAKAVPCHRQGEQEETALCRGAWEPGIQLGPVEVKPEWGMPPGEGVQGPDPGTEEQLSQDPGDETRAFQEQALPVLQAGPGLPAVNPRDQEMAAGFFTAGSQGLGPFKDMALAFPEEEWRHVTPAQIDCFGEYVEPQDCRVSPGGGSKEKEAKPPQEDLKGALVALTSERFGEASLQGPGLGRVCEQEPGGPAGSAPGLPPPQHGAIPLPDEVKTHSSFWKPFQCPECGKGFSRSSNLVRHQRTHEEKSYGCVECGKGFTLREYLMKHQRTHLGKRPYVCSECWKTFSQRHHLEVHQRSHTGEKPYKCGDCWKSFSRRQHLQVHRRTHTGEKPYTCECGKSFSRNANLAVHRRAHTGEKPYGCQVCGKRFSKGERLVRHQRIHTGEKPYHCPACGRSFNQRSILNRHQKTQHRQEPLVQ

SEQ ID NO: 16489 - protein, 478 aa, Homo Sapiens
MATALVSAHSLAPLNLKKEGLRVVREDHYSTWEQGFKLQGNSKGLGQEPLCKQFRQLRYEETTGPREALSRLRELCQQWLQPETHTKEQILELLVLEQFLIILPKELQARVQEHHPESREDVVVVLEDLQLDLGETGQQDPDQPKKQKILVEEMAPLKGVQEQQVRHECEVTKPEKEKGEETRIENGKLIVVTDSCGRVESSGKISEPMEAHNEGSNLERHQAKPKEKIEYKCSEREQRFIQHLDLIEHASTHTGKKLCESDVCQSSSLTGHKKVLSREKGHQCHECGKAFQRSSHLVRHQKIHLGEKPYQCNECGKVFSQNAGLLEHLRIHTGEKPYLCIHCGKNFRRSSHLNRHQRIHSQEEPCECKECGKTFSQALLLTHHQRIHSHSKSHQCNECGKAFSLTSDLIRHHRIHTGEKPFKCNICQKAFRLNSHLAQHVRIHNEEKPYQCSECGEAFRQRSGLFQHQRYHHKDKLA

SEQ ID NO: 16490 - protein, 852 aa, Homo Sapiens; identical to SEQ ID NO: 14472

SEQ ID NO: 16491 - protein, 494 aa, Homo Sapiens
MSGEATVLAYHAPEEQEGLLVVKVEEENYVLDQDFGLQENPWSQEVFRQKFRQFSYSDSTGPREALSRLRELCCQWLRPEVHSKEQILELLMLEQFLAILPEELQAWLREHRPENGEEAVTMLEELEKELEEPRQQDTTHGQEMFWQEMTSTGALKSLSLNSPVQPLENQCKTETQESQAFQERDGRMVAGKVLMAKQEIVECVASAAMISPGKLPGETHSQRIAEEALGGLDNSKKQKGNAAGNKISQLPSQDRHFSLATFNRRIPTEHSVLESHESEGSFSMNSNDITQQSVDTREKLYECFDCGKAFCQSSKLIRHQRIHTGERPYACKECGKAFSLSSDLVRHQRIHSGEKPYECCECGKAFRGSSELIRHRRIHTGEKPYECGECGKAFSRSSALIQHKKIHTGDKSYECIACGKAFGRSSILIEHQRIHTGEKPYECNECGKSFNQSSALTQHQRIHTGEKPYECSECRKTFRHRSGLMQHQRTHTRV

SEQ ID NO: 16492 - protein, 406 aa, Homo Sapiens
MASTEEQYDLKIVKVEEDPIWDQETHLRGNNFSGQEASRQLFRQFCYQETPGPREALSRLRELCHQWLRPEIHTKEQILELLVLEQFLTILPEELQAWVREHHPESGEEAVAVVEDLEQELSEPGNQAPDHEHGHSEVLLEDVEHLKVKQEPTDIQLQPMVTQLRYESFCLHQFQEQDGESIPENQELASKQEILKEMEHLGDSKLQRDVSLDSKYRETCKRDSKAEKQQAHSTGERRHRCNECGKSFTKSSVLIEHQRIHTGEKPYECEECGKAFSRRSSLNEHRRSHTGEKPYQCKECGKAFSASNGLTRHRRIHTGEKPYECKVCGKAFLLSSCLVQHQRIHTGEKRYQCRECGKAFIQNAGLFQHLRVHTGEKPYQCSQCSKLFSKRTLLKKHQKIHTGERP

SEQ ID NO: 16493 - protein, 697 aa, Homo Sapiens
MMAAVKSTEAHPSSNKDPTQGQKSALQGNSPDSEASRQRFRQFCYQEVTGPHEAFSKLWELCCQWLRPKTHSKEEILELLVLEQFLTILPEEIQTWVREQHPENGEEAVALVEDVQRAPGQQVLDSEKDLKVLMKEMAPLGATRESLRSQWKQEVQPEEPTFKGSQSSHQRPGEQSEAWLAPQAPRNLPQNTGLHDQETGAVVWTAGSQGPAMRDNRAVSLCQQEWMCPGPAQRALYRGATQRKDSHVSLATGVPWGYEETKTLLAILSSSQFYGKLQTCQQNSQIYRAMAEGLWEQGFLRTPEQCRTKFKSLQLSYRKVRRGRVPEPCIFYEEMNALSGSWASAPPMASDAVPGQEGSDIEAGELNHQNGEPTEVEDGTVDGADRDEKDFRNPGQEVRKLDLPVLFPNRLGFEFKNEIKKENLKWDDSEEVEINKALQRKSRGVYWHSELQKGLESEPTSRRQCRNSPGESEEKTPSQEKMSHQSFCARDKACTHILCGKNCSQSVHSPHKPALKLEKVSQCPECGKTFSRSSYLVRHQRIHTGEKPHKCSECGKGFSERSNLTAHLRTHTGERPYQCGQCGKSFNQSSSLIVHQRTHTGEKPYQCIVCGKRFNNSSQFSAHRRIHTGESPYKCAVCGKIFNNSSHFSAHRKTHTGEKPYRCSHCERGFTKNSALTRHQTVHMKAVLSSQEGRDAL

SEQ ID NO: 16494 - protein, 433 aa, Homo Sapiens
MALDLRTIFQCEPSENNLGSENSAFQQSQGPAVQREEGISEFSRMVLNSFQDSNNSYARQELQRLYRIFHSWLQPEKHSKDEIISLLVLEQFMIGGHCNDKASVKEKWKSSGKNLERFIEDLTDDSINPPALVHVHMQGQEALFSEDMPLRDVIVHLTKQVNAQTTREANMGTPSQTSQDTSLETGQGYEDEQDGWNSSSKTTRVNENITNQGNQIVSLIIIQEENGPRPEEGGVSSDNPYNSKRAELVTARSQEGSINGITFQGVPMVMGAGCISQPEQSSPESALTHQSNEGNSTCEVHQKGSHGVQKSYKCEECPKVFKYLCHLLAHQRRHRNERPFVCPECQKGFFQISDLRVHQIIHTGKKPFTCSMCKKSFSHKTNLRSHERIHTGEKPYTCPFCKTSYRQSSTYHRHMRTHEKITLPSVPSTPEAS

SEQ ID NO: 16495 - protein, 496 aa, Homo Sapiens
MAANCTSSWSLGESCNRPGLELPRSMASSETQLGNHDVDPEISHVNFRMFSCPKESDPIQALRKLTELCHLWLRPDLHTKEQILDMLVMEQFMISMPQELQVLVMMNGVQSCKDLEDLLRNNRRPKKWSVVTFHGKEYIVQDSDIEMAEAPSSVRDDLKDVSSQRASSVNQMRPGEGQAHRELQILPRVPALSRRQGEDFLLHKSIDVTGDPKSLRPKQTLEKDLKENREENPGLTSPEPQLPKSPTDLVRAKEGKDPPKIASVENVDADTPSACVVEREASTHSGNRGDALNLSSPKRSKPDASSISQEEPQGEATPVGNRESPGQAGMNSIHSPGPASPVSHPDGQEAKALPPFACDVCEKRFTCNSKLVIHKRSHTGERLFQCNLCGKRFMQLISLQFHQRTHTGERPYTCDVCQKQFTQKSYLKCHKRSHTGEKPFECKDCKKVFTYRGSLKEHQRIHSGEKPYKCSKCPRAFSRLKLLRRHQKTHPEATSQ

SEQ ID NO: 16496 - protein, 495 aa, Homo Sapiens
MAANWTLSWGQGGPCNSPGSDTPRSVASPETQLGNHDRNPETWHMNFRMFSCPEESDPIQALRKLTELCHLWLRPDLHTKEQILDMLVMEQFMISMPQELQVLVKVNGVQSCKDLEDLLRNNRRPKKWSIVNLLGKEYLMLNSDVEMAEAPASVRDDPRDVSSQWASSVNQMHPGTGQARREQQILPRVAALSRRQGEDFLLHKSIDVTGDPNSPRPKQTLEKDLKENREENPGLSSPEPQLPKSPNLVRAKEGKEPQKRASVENVDADTPSACVVEREALTHSGNRGDALNLSSPKRSKPDASSISQEEPQGEATPVGNRESPGQAEINPVHSPGPAGPVSHPDGQEAKALPPFACDVCNKSFKYFSQLSIHRRSHTGDRPFQCDLCRKRFLQPSDLRVHQRVHTGERPYMCDVCQKRFAHESTLQGHKRIHTGERPFKCKYCSKVFSHKGNLNVHQRTHSGEKPYKCPTCQKAFRQLGTFKRHLKTHRETTSQ

SEQ ID NO: 16497 - protein, 496 aa, Homo Sapiens
MAANCTSSWSLGESCNSPGSEPPQSMPSPATQLGNHDSDPETCHVNFRMFSCPKESDPIQALRKLTELCHLWLRPDLHTKEQILDMLVMEQFMISMPQELQVLVMMNGVQSCKDLEDLLRNNRRPKKWSVVSFLGKEYLMQESDVEMAEAPASVRDDPRHVSSQRTSSVNQMCPEEGQASQELQTLPRVPALFRRQEEDFLLPETTVMKGDPKALRPKPTLEKDLEEDREENPGLTSPEPQLPNSPTGVVGAKEGKEPQKRASVENVDADTPSACVVEREASTHSGSRGDALNLRGLKRSKPDATSISQEEPQGEATPVGNRESPGQAEINPVHSPGPAGPVSHPSGQEVKELLPFACEVCGKRFKYRGKLAVHTRSHTGERLFQCNLCGKRFMQRIGLQFHQRTHTGERPYTCDICQKQFTQKSYLKCHKRSHTGEKPFECKDCKKVFTYKANLKEHQRIHSGEKPHKCSKCPRAFGRPATLRRHQKTHREATSQ

SEQ ID NO: 16498 - protein, 394 aa, Homo Sapiens
MNTNSKEVLSLGVQVPEAWEELLTMKVEAKSHLQWQESRLKRSNPLAREIFRRHFRQLCYQETPGPREALTRLQELCYQWLRPHVSTKEQILDLLVLEQFLSILPKELQGWVREHCPESGEEAVILLEDLERELDEPQHEMVAHRHRQEVLCKEMVPLAEQTPLTLQSQPKEPQLTCDSAQKCHSIGETDEVTKTEDRELVLRKDCPKIVEPHGKMFNEQTWEVSQQDPSHGEVGEHKDRIERQWGNLLGEGQHKCDECGKSFTQSSGLIRHQRIHTGERPYECNECGKAFSRSSGLFNHRGIHNIQKRYHCKECGKVFSQSAGLIQHQRIHKGEKPYQCSQCSKSYSRRSFLIEHQRSHTGERPHQCIECGKSFNRHCNLIRHQKIHTVAELV

SEQ ID NO: 16499 - protein, 578 aa, Homo Sapiens
MLSCNICGETVTSEPDMKAHLIVHMESEIICPFCKLSGVNYDEMCFHIETAHFEQNTLERNFERINTVQYGTSDNKKDNTLQCGMEVNSSILSGCASNHPKNSAQNLTKDSTLKHEGFYSENLTESRKFLKSREKQSSLTEIKGSVYETTYSPPECPFCGKIEEHSEDMETHVKTKHANLLDIPLEDCDQPLYDCPMCGLICTNYHILQEHVDLHLEENSFQQGMDRVQCSGDLQLAHQLQQEEDRKRRSEESRQEIEEFQKLQRQYGLDNSGGYKQQQLRNMEIEVNRGRMPPSEFHRRKADMMESLALGFDDGKTKTSGIIEALHRYYQNAATDVRRVWLSSVVDHFHSSLGDKGWGCGYRNFQMLLSSLLQNDAYNDCLKGMLIPCIPKIQSMIEDAWKEGFDPQGASQLNNRLQGTKAWIGACEVYILLTSLRVKCHIVDFHKSTGPLGTHPRLFEWILNYYSSEGEGSPKVVCTSKPPIYLQHQGHSRTVIGIEEKKNRTLCLLILDPGCPSREMQKLLKQDIEASSLKQLRKSMGNLKHKQYQILAVEGALSLEEKLARRQASQVFTAEKIP

SEQ ID NO: 16500 - protein, 799 aa, Homo Sapiens
MEIPKLLPARGTLQGGGGGGIPAGGGRVHRGPDSPAGQVPTRRLLLPRGPQDGGPGRRREEASTASRGPGPSLFAPRPHQPSGGGDDFFLVLLDPVGGDVETAGSGQAAGPVLREEAKAGPGLQGDESGANPAGCSAQGPHCLSAVPTPAPISAPGPAAAFAGTVTIHNQDLLLRFENGVLTLATPPPHAWEPGAAPAQQPRCLIAPQAGFPQAAHPGDCPELRSDLLLAEPAEPAPAPAPQEEAEGLAAALGPRGLLGSGPGVVLYLCPEALCGQTFAKKHQLKMHLLTHSSSQGQRPFKCPLGGCGWTFTTSYKLKRHLQSHDKLRPFGCPAEGCGKSFTTVYNLKAHMKGHEQENSFKCEVCEESFPTQAKLGAHQRSHFEPERPYQCAFSGCKKTFITVSALFSHNRAHFREQELFSCSFPGCSKQYDKACRLKIHLRSHTGERPFLCDFDGCGWNFTSMSKLLRHKRKHDDDRRFMCPVEGCGKSFTRAEHLKGHSITHLGTKPFVCPVAGCCARFSARSSLYIHSKKHLQDVDTWKSRCPISSCNKLFTSKHSMKTHMVKRHKVGQDLLAQLEAANSLTPSSELTSQRQNDLSDAEIVSLFSDVPDSTSAALLDTALVNSGILTIDVASVSSTLAGHLPANNNNSVGQAVDPPSLMATSDPPQSLDTSLFFGTAATGFQQSSLNMDEVSSVSVGPLGSLDSLAMKNSSPEPQALTPSSKLTVDTDTLTPSSTLCENSVSELLTPAKAEWSVHPNSDFFGQEGETQFGFPNAAGNHGSQKERNLITVTGSSFLV

SEQ ID NO: 16501 - protein, 803 aa, Homo Sapiens
MEIPKLLPARGTLQGGGGGGIPAGGGRVHRGPDSPAGQVPTRRLLLLRGPQDGGPGRRREEASTASRGPGPSLLAPRTDQPSGGGGGGGDDFFLVLLDPVGGDVETAGSGQAAGPVLREEAEEGPGLQGGESGANPAGPTALGPRCLSAVPTPAPISAPGPAAAFAGTVTIHNQDLLLRFENGVLTLATPPPHAWEPGAAPAQQPGCLIAPQAGFPHAAHPGDCPELPPDLLLAEPAEPAPAPAPEEEAEGPAAALGPRGPLGSGPGVVLYLCPEAQCGQTFAKKHQLKVHLLTHSSSQGQRPFKCPLGGCGWTFTTSYKLKRHLQSHDKLRPFGCPAEGCGKSFTTVYNLKAHMKGHEQENSFKCEVCEESFPTQAKLSAHQRSHFEPERPYQCAFSGCKKTFITVSALFSHNRAHFREQELFSCSFPGCSKQYDKACRLKIHLRSHTGERPFLCDFDGCGWNFTSMSKLLRHKRKHDDDRRFMCPVEGCGKSFTRAEHLKGHSITHLGTKPFVCPVAGCCARFSARSSLYIHSKKHLQDVDTWKSRCPISSCNKLFTSKHSMKTHMVKRHKVGQDLLAQLEAANSLTPSSELTSQRQNDLSDAEIVSLFSDVPDSTSAALLDTALVNSGILTIDVASVSSTLAGHLPANNNNSVGQAVDPPSLMATSDPPQSLDTSLFFGTAATGFQQSSLNMDEVSSVSVGPLGSLDSLAMKNSSPEPQALTPSSKLTVDTDALTPSSTLCENSVSELLTPTKAEWNVHPDSDFFGQEGETQFGFPNAAGNHGSQKETDLITVTGSSFLV

SEQ ID NO: 16502 - protein, 858 aa, Homo Sapiens
MDLPALLPAPTARGGQHGGGPGPLRRAPAPLGASPARRRLLLVRGPEDGGPGARPGEASGPSPPPAEDDSDGDSFLVLLEVPHGGAAAEAAGSQEAEPGSRVNLASRPEQGPSGPAAPPGPGVAPAGAVTISSQDLLVRLDRGVLALSAPPGPATAGAAAPRRAPQASGPSTPGYRCPEPQCALAFAKKHQLKVHLLTHGGGQGRRPFKCPLEGCGWAFTTSYKLKRHLQSHDKLRPFGCPVGGCGKKFTTVYNLKAHMKGHEQESLFKCEVCAERFPTHAKLSSHQRSHFEPERPYKCDFPGCEKTFITVSALFSHNRAHFREQELFSCSFPGCSKQYDKACRLKIHLRSHTGERPFICDSDSCGWTFTSMSKLLRHRRKHDDDRRFTCPVEGCGKSFTRAEHLKGHSITHLGTKPFECPVEGCCARFSARSSLYIHSKKHVQDVGAPKSRCPVSTCNRLFTSKHSMKAHMVRQHSRRQDLLPQLEAPSSLTPSSELSSPGQSELTNMDLAALFSDTPANASGSAGGSDEALNSGILTIDVTSVSSSLGGNLPANNSSLGPMEPLVLVAHSDIPPSLDSPLVLGTAATVLQQGSFSVDDVQTVSAGALGCLVALPMKNLSDDPLALTSNSNLAAHITTPTSSSTPRENASVPELLAPIKVEPDSPSRPGAVGQQEGSHGLPQSTLPSPAEQHGAQDTELSAGTGNFYLESGGSARTDYRAIQLAKEKKQRGAGSNAGASQSTQRKIKEGKMSPPHFHASQNSWLCGSLVVPSGGRPGPAPAAGVQCGAQGVQVQLVQDDPSGEGVLPSARGPATFLPFLTVDLPVYVLQEVLPSSGGPAGPEATQFPGSTINLQDLQ

SEQ ID NO: 16503 - protein, 903 aa, Homo Sapiens
MAASRSTRVTRSTVGLNGLDESFCGRTLRNRSIAHPEEISSNSQVRSRSPKKRPEPVPIQKGNNNGRTTDLKQQSTRESWVSPRKRGLSSSEKDNIERQAIENCERRQTEPVSPVLKRIKRCLRSEAPNSSEEDSPIKSDKESVEQRSTVVDNDADFQGTKRACRCLILDDCEKREIKKVNVSEEGPLNSAVVEEITGYLAVNGVDDSDSAVINCDDCQPDGNTKQNSIGSYVLQEKSVAENGDTDTQTSMFLDSRKEDSYIDHKVPCTDSQVQVKLEDHKIVTACLPVEHVNQLTTEPATGPFSETQSSLRDSEEEVDVVGDSSASKEQCKENTNNELDTSLESMPASGEPEPSPVLDCVSAQMMSLSEPQEHRYTLRTSPRRAAPTRGSPTKNSSPYRENGQFEENNLSPNETNATVSDNVSQSPTNPGEISQNEKGICCDSQNNGSEGVSKPPSEARLNIGHLPSAKESASQHITEEEDDDPDVYYFESDHVALKHNKDYQRLLQTIAVLEAQRSQAVQDLESLGRHQREALKNPIGFVEKLQKKADIGLPYPQRVVQLPEIVWDQYTHSLGNFEREFKNRKRHTRRVKLVFDKVGLPARPKSPLDPKKDGESLSYSMLPLSDGPEGSSSRPQMIRGRLCDDTKPETFNQLWTVEEQKKLEQLLIKYPPEEVESRRWQKIADELGNRTAKQVASRVQKYFIKLTKAGIPVPGRTPNLYIYSKKSSTSRRQHPLNKHLFKPSTFMTSHEPPVYMDEDDDRSCFHSHMNTAVEDASDDESIPIMYRNLPEYKELLQFKKLKKQKLQQMQAESGFVQHVGFKCDNCGIEPIQGVRWHCQDCPPEMSLDFCDSCSDCLHETDIHKEDHQLEPIYRSETFLDRDYCVSQGTSYNYLDPNYFPANR

SEQ ID NO: 16504 - protein, 455 aa, Homo Sapiens; identical to SEQ ID NO: 13589

SEQ ID NO: 16505 - protein, 461 aa, Homo Sapiens; identical to SEQ ID NO: 13591

SEQ ID NO: 16506 - protein, 417 aa, Homo Sapiens; identical to SEQ ID NO: 13599

SEQ ID NO: 16507 - protein, 655 aa, Homo Sapiens
MGTSPSSSTALASCSRIARRATATMIAGSLLLLGFLSTTTAQPEQKASNLIGTYRHVDRATGQVLTCDKCPAGTYVSEHCTNTSLRVCSSCPVGTFTRHENGIEKCHDCSQPCPWPMIEKLPCAALTDRECTCPPGMFQSNATCAPHTVCPVGWGVRKKGTETEDVRCKQCARGTFSDVPSSVMKCKAYTDCLSQNLVVIKPGTKETDNVCGTLPSFSSSTSPSPGTAIFPRPEHMETHEVPSSTYVPKGMNSTESNSSASVRPKVLSSIQEGTVPDNTSSARGKEDVNKTLPNLQVVNHQQGPHHRHILKLLPSMEATGGEKSSTPIKGPKRGHPRQNLHKHFDINEHLPWMIVLFLLLVLVVIVVCSIRKSSRTLKKGPRQDPSAIVEKAGLKKSMTPTQNREKWIYYCNGHGIDILKLVAAQVGSQWKDIYQFLCNASEREVAAFSNGYTADHERAYAALQHWTIRGPEASLAQLISALRQHRRNDVVEKIRGLMEDTTQLETDKLALPMSPSPLSPSPIPSPNAKLENSALLTVEPSPQDKNKGFFVDESEPLLRCDSTSSGSSALSRNGSFITKEKKDTVLRQVRLDPCDLQPIFDDMLHFLNPEELRVIEEIPQAEDKLDRLFEIIGVKSQEASQTLLDSVYSHLPDLL

SEQ ID NO: 16508 - protein, 335 aa, Homo Sapiens; identical to SEQ ID NO: 5109

SEQ ID NO: 16509 - protein, 2511 aa, Homo Sapiens
MEEVVIAGMSGKLPESENLQEFWDNLIGGVDMVTDDDRRWKAGLYGLPRRSGKLKDLSRFDASFFGVHPKQAHTMDPQLRLLLEVTYEAIVDGGINPDSLRGTHTGVWVGVSGSETSEALSRDPETLVGYSMVGCQRAMMANRLSFFFDFRGPSIALDTACSSSLMALQNAYQAIHSGQCPAAIVGGINVLLKPNTSVQFLRLGMLSPEGTCKAFDTAGNGYCRSEGVVAVLLTKKSLARRVYATILNAGTNTDGFKEQGVTFPSGDIQEQLIRSLYQSAGVAPESFEYIEAHGTGTKVGDPQELNGITRALCATRQEPLLIGSTKSNMGHPEPASGLAALAKVLLSLEHGLWAPNLHFHSPNPEIPALLDGRLQVVDQPLPVRGGNVGINSFGFGGSNVHIILRPNTQPPPAPAPHATLPRLLRASGRTPEAVQKLLEQGLRHSQDLAFLSMLNDIAAVPATAMPFRGYAVLGGERGGPEVQQVPAGERPLWFICSGMGTQWRGMGLSLMRLDRFRDSILRSDEAVKPFGLKVSQLLLSTDESTFDDIVHSFVSLTAIQIGLIDLLSCMGLRPDGIVGHSLGEVACGYADGCLSQEEAVLAAYWRGQCIKEAHLPPGAMAAVGLSWEECKQRCPPGVVPACHNSKDTVTISGPQAPVFEFVEQLRKEGVFAKEVRTGGMAFHSYFMEAIAPPLLQELKKVIREPKPRSARWLSTSIPEAQWHSSLARTSSAEYNVNNLVSPVLFQEALWHVPEHAVVLEIAPHALLQAVLKRGLKPSCTIIPLMKKDHRDNLEFFLAGIGRLHLSGIDANPNALFPPVEFPAPRGTPLISPLIKWDHSLAWDVPAAEDFPNGSGSPSAAIYNIDTSSESPDHYLVDHTLDGRVLFPATGYLSIVWKTLARALGLGVEQLPVVFEDVVLHQATILPKTGTVSLEVRLLEASRAFEVSENGNLVVSGKVYQWDDPDPRLFDHPESPTPNPTEPLFLAQAEVYKELRLRGYDYGPHFQGILEASLEGDSGRLLWKDNWVSFMDTMLQMSILGSAKHGLYLPTRVTAIHIDPATHRQKLYTLQDKAQVADVVVSRWLRVTVAGGVHISGLHTESAPRRQQEQQVPILEKFCFTPHTEEGCLSERAALQEELQLCKGLVQALQTKVTQQGLKMVVPGLDGAQIPRDPSQQELPRLLSAACRLQLNGNLQLELAQVLAQERPKLPEDPLLSGLLDSPALKACLDTAVENMPSLKMKVVEVLAGHGHLYSRIPGLLSPHPLLQLSYTATDRHPQALEAAQAELQQHDVAQGQWDPADPAPSALGSADLLVCNCAVAALGDPASALSNMVAALREGGFLLLHTLLRGHPLGDIVAFLTSTEPQYGQGILSQDAWESLFSRVSLRLVGLKKSFYGSTLFLCRRPTPQDSPIFLPVDDTSFRWVESLKGILADEDSSRPVWLKAINCATSGVVGLVNCLRREPGGNRLRCVLLSNLSSTSHVPEVDPGSAELQKVLQGDLVMNVYRDGAWGAFRHFLLEEDKPEEPTAHAFVSTLTRGDLSSIRWVCSSLRHAQPTCPGAQLCTVYYASLNFRDIMLATGKLSPDAIPGKWTSQDSLLGMEFSGRDASGKRVMGLVPAKGLATSVLLSPDFLWDVPSNWTLEEAASVPVVYSTAYYALVVRGRVRPGETLLIHSGSGGVGQAAIAIALSLGCRVFTTVGSAEKRAYLQARFPQLDSTSFANSRDTSFEQHVLWHTGGKGVDLVLNSLAEEKLQASVRCLATHGRFLEIGKFDLSQNHPLGMAIFLKNVTFHGVLLDAFFNESSADWREVWALVQAGIRDGVVRPLKCTVFHGAQVEDAFRYMAQGKHIGKVVVQVLAEEPEAVLKGAKPKLMSAISKTFCPAHKSYIIAGGLGGFGLELAQWLIQRGVQKLVLTSRSGIRTGYQAKQVRRWRRQGVQVQVSTSNISSLEGARGLIAEAAQLGPVGGVFNLAVVLRDGLLENQTPEFFQDVCKPKYSGTLNLDRVTREACPELDYFVVFSSVSCGRGNAGQSNYGFANSAMERICEKRRHEGLPGLAVQWGAIGDVGILVETMSTNDTIVSGTLPQRMASCLEVLDLFLNQPHMVLSSFVLAEKAAAYRDRDSQRDLVEAVAHILGIRDLAAVNLDSSLADLGLDSLMSVEVRQTLERELNLVLSVREVRQLTLRKLQELSSKADEASELACPTPKEDGLAQQQTQLNLRSLLVNPEGPTLMRLNSVQSSERPLFLVHPIEGSTTVFHSLASRLSIPTYGLQCTRAAPLDSIHSLAAYYIDCIRQVQPEGPYRVAGYSYGACVAFEMCSQLQAQQSPAPTHNSLFLFDGSPTYVLAYTQSYRAKLTPGCEAEAETEAICFFVQQFTDMEHNRVLEALLPLKGLEERVAAAVDLIIKSHQGLDRQELSFAARSFYYKLRAAEQYTPKAKYHGNVMLLRAKTGGAYGEDLGADYNLSQVCDGKVSVHVIEGDHRTLLEGSGLESIISIIHSSLAEPRVSVREG

SEQ ID NO: 16510 - protein, 281 aa, Homo Sapiens
MQQPFNYPYPQIYWVDSSASSPWAPPGTVLPCPTSVPRRPGQRRPPPPPPPPPLPPPPPPPPLPPLPLPPLKKRGNHSTGLCLLVMFFMVLVALVGLGLGMFQLFHLQKELAELRESTSQMHTASSLEKQIGHPSPPPEKKELRKVAHLTGKSNSRSMPLEWEDTYGIVLLSGVKYKKGGLVINETGLYFVYSKVYFRGQSCNNLPLSHKVYMRNSKYPQDLVMMEGKMMSYCTTGQMWARSSYLGAVFNLTSADHLYVNVSELSLVNFEESQTFFGLYKL

SEQ ID NO: 16511 - protein, 393 aa, Homo Sapiens [sequence omitted]

SEQ ID NO: 16512 - protein, 455 aa, Homo Sapiens; identical to SEQ ID NO: 13589

SEQ ID NO: 16513 - protein, 461 aa, Homo Sapiens; identical to SEQ ID NO: 13591

SEQ ID NO: 16514 - protein, 468 aa, Homo Sapiens
MAPPPARVHLGAFLAVTPNPGSAASGTEAAAATPSKVWGSSAGRIEPRGGGRGALPTSMGQHGPSARARAGRAPGPRPAREASPRLRVHKTFKFVVVGVLLQVVPSSAATIKLHDQSIGTQQWEHSPLGELCPPGSHRSEHPGACNRCTEGVGYTNASNNLFACLPCTACKSDEEERSPCTTTRNTACQCKPGTFRNDNSAEMCRKCSRGCPRGMVKVKDCTPWSDIECVHKESGNGHNIWVILVVTLVVPLLLVAVLIVCCCIGSGCGGDPKCMDRVCFWRLGLLRGPGAEDNAHNEILSNADSLSTFVSEQQMESQEPADLTGVTVQSPGEAQCLLGPAEAEGSQRRRLLVPANGADPTETLMLFFDKFANIVPFDSWDQLMRQLDLTKNEIDVVRAGTAGPGDALYAMLMKWVNKTGRNASIHTLLDALERMEERHAREKIQDLLVDSGKFIYLEDGTGSAVSLE

SEQ ID NO: 16515 - protein, 440 aa, Homo Sapiens
MEQRGQNAPAASGARKRHGPGPREARGARPGPRVPKTLVLVVAAVLLLVSAESALITQQDLAPQQRAAPQQKRSSPSEGLCPPGHHISEDGRDCISCKYGQDYSTHWNDLLFCLRCTRCDSGEVELSPCTTTRNTVCQCEEGTFREEDSPEMCRKCRTGCPRGMVKVGDCTPWSDIECVHKESGTKHSGEVPAVEETVTSSPGTPASPCSLSGIIIGVTVAAVVLIVAVFVCKSLLWKKVLPYLKGICSGGGGDPERVDRSSQRPGAEDNVLNEIVSILQPTQVPEQEMEVQEPAEPTGVNMLSPGESEHLLEPAEAERSQRRRLLVPANEGDPTETLRQCFDDFADLVPFDSWEPLMRKLGLMDNEIKVAKAEAAGHRDTLYTMLIKWVNKTGRDASVHTLLDALETLGERLAKQKIEDHLLSSGKFMYLEGNADSAMS

SEQ ID NO: 16516 - protein, 208 aa, Homo Sapiens
MDPFLVLLHSVSSSLSSSELTELKFLCLGRVGKRKLERVQSGLDLFSMLLEQNDLEPGHTELLRELLASLRRHDLLRRVDDFEAGAAAGAAPGEEDLCAAFNVICDNVGKDWRRLARQLKVSDTKIDSIEDRYPRNLTERVRESLRIWKNTEKENATVAHLVGALRSCQMNLVADLVQEVQQARDLQNRSGAMSPMSWNSDASTSEAS

SEQ ID NO: 16517 - protein, 312 aa, Homo Sapiens
MAAGQNGHEEWVGSAYLFVESSLDKVVLSDAYAHPQQKVAVYRALQAALAESGGSPDVLQMLKIHRSDPQLIVQLRFCGRQPCGRFLRAYREGALRAALQRSLAAALAQHSVPLQLELRAGAERLDALLADEERCLSCILAQQPDRLRDEELAELEDALRNLKCGSGARGGDGEVASAPLQPPVPSLSEVKPPPPPPPAQTFLFQGQPVVNRPLSLKDQQTFARSVGLKWRKVGRSLQRGCRALRDPALDSLAYEYEREGLYEQAFQLLRRFVQAEGRRATLQRLVEALEENELTSLAEDLLGLTDPNGGLA

SEQ ID NO: 16518 - protein, 192 aa, Homo Sapiens
MDGSGEQPRGGGPTSSEQIMKTGALLLQGFIQDRAGRMGGEAPELALDPVPQDASTKKLSECLKRIGDELDSNMELQRMIAAVDTDSPREVFFRVAADMFSDGNFNWGRVVALFYFASKLVLKALCTKVPELIRTIMGWTLDFLRERLLGWIQDQGGWDGLLSYFGTPTWQTVTIFVAGVLTASLTIWKKMG

SEQ ID NO: 16519 - protein, 211 aa, Homo Sapiens
MASGQGPGPPRQECGEPALPSASEEQVAQDTEEVFRSYVFYRHQQEQEAEGVAAPADPEMVTLPLQPSSTMGQVGRQLAIIGDDINRRYDSEFQTMLQHLQPTAENAYEYFTKIATSLFESGINWGRVVALLGFGYRLALHVYQHGLTGFLGQVTRFVVDFMLHHCIARWIAQRGGWVAALNLGNGPILNVLVVLGVVLLGQFVVRRFFKS

SEQ ID NO: 16520 - protein, 246 aa, Homo Sapiens
MTMDKSELVQKAKLAEQAERYDDMAAAMKAVTEQGHELSNEERNLLSVAYKNVVGARRSSWRVISSIEQKTERNEKKQQMGKEYREKIEAELQDICNDVLELLDKYLIPNATQPESKVFYLKMKGDYFRYLSEVASGDNKQTTVSNSQQAYQEAFEISKKEMQPTHPIRLGLALNFSVFYYEILNSPEKACSLAKTAFDEAIAELDTLNEESYKDSTLIMQLLRDNLTLWTSENQGDEGDAGEGEN

SEQ ID NO: 16521 - protein, 239 aa, Homo Sapiens
MAHAGRTGYDNREIVMKYIHYKLSQRGYEWDAGDVGAAPPGAAPAPGIFSSQPGHTPHPAASRDPVARTSPLQTPAAPGAAAGPALSPVPPVVHLTLRQAGDDFSRRYRRDFAEMSSQLHLTPFTARGRFATVVEELFRDGVNWGRIVAFFEFGGVMCVESVNREMSPLVDNIALWMTEYLNRHLHTWIQDNGGWDAFVELYGPSMRPLFDFSWLSLKTLLSLALVGACITLGAYLGHK

SEQ ID NO: 16522 - protein, 105 aa, Homo Sapiens
MGDVEKGKKIFIMKCSQCHTVEKGGKHKTGPNLHGLFGRKTGQAPGYSYTAANKNKGIIWGEDTLMEYLENPKKYIPGTKMIFVGIKKKEERADLIAYLKKATNE

SEQ ID NO: 16523 - protein, 239 aa, Homo Sapiens
MAALKSWLSRSVTSFFRYRQCLCVPVVANFKKRCFSELIRPWHKTVTIGFGVTLCAVPIAQKSEPHSLSSEALMRRAVSLVTDSTSTFLSQTTYALIEAITEYTKAVYTLTSLYRQYTSLLGKMNSEEEDEVWQVIIGARAEMTSKHQEYLKLETTWMTAVGLSEMAAEAAYQTGADQASITARNHIQLVKLQVEEVHQLSRKAETKLAEAQIEELRQKTQEEGEERAESEQEAYLRED

SEQ ID NO: 16524 - protein, 422 aa, Homo Sapiens
MALRGSHRLEVIFKRCIASPVLHSHAANRRSSQLAIKEGDPNSNGNSGQYQQNGEQKEKGWRRLVRFFVPFSLGAVVSAAIIQREDLTPTIAASKMTGRRRDFNFIADVVAGCADSVVYIEIKDTRHFDYFSGQPITASNGSGFIIEQNGLILTNAHVVINKPHTMVQVRLSDGRTFPATIEDVDQTSDLATLRIQVNNLSVMRLGKSSTLRSGEWVVALGSPLALSNTVTAGVISSTQRASQELGLRNRDINYLQTDAAITFGNSGGPLVNLDGEAIGVNSMKVTAGISFAIPIDYVKVFLERAAEKRKKGSAYKTGYPVKRYMGITMLTLTPDILFELKSRSQNMPSNLTHGVLVWKVIVGSPAHSGGLQPGDIVTHINKKEIKNSSDVYDALADNSKTLDIVILRGVKQMHVTITPEDP

SEQ ID NO: 16525 - protein, 613 aa, Homo Sapiens
MFRCGGLAAGALKQKLVPLVRTVCVRSPRQRNRLPGNLFQRWHVPLELQMTRQMASSGASGGKIDNSVLVLIVGLSTVGAGAYAYKTMKEDEKRYNERISGLGLTPEQKQKKAALSASEGEEVPQDKAPSHVPFLLIGGGTAAFAAARSIRARDPGARVLIVSEDPELPYMRPPLSKELWFSDDPNVTKTLRFKQWNGKERSIYFQPPSFYVSAQDLPHIENGGVAVLTGKKVVQLDVRDNMVKLNDGSQITYEKCLIATGGTPRSLSAIDRAGAEVKSRTTLFRKIGDFRSLEKISREVKSITIIGGGFLGSELACALGRKARALGTEVIQLFPEKGNMGKILPEYLSNWTMEKVRREGVKVMPNAIVQSVGVSSGKLLIKLKDGRKVETDHIVAAVGLEPNVELAKTGGLEIDSDFGGFRVNAELQARSNIWVAGDAACFYDIKLGRRRVEHHDHAVVSGRLAGENMTGAAKPYWHQSMFWSDLGPDVGYEAIGLVDSSLPTVGVFAKATAQDNPKSATEQSGTGIRSESETESEASEITIPPSTPAVPQAPVQGEDYGKGVIFYLRDKVVVGIVLWNIFNRMPIARKIIKDGEQHEDLNEVAKLFNIHED

SEQ ID NO: 16526 - protein, 368 aa, Homo Sapiens; identical to SEQ ID NO: 4940

SEQ ID NO: 16527 - protein, 416 aa, Homo Sapiens
MDEADRRLLRRCRLRLVEELQVDQLWDALLSRELFRPHMIEDIQRAGSGSRRDQARQLIIDLETRGSQALPLFISCLEDTGQDMLASFLRTNRQAAKLSKPTLENLTPVVLRPEIRKPEVLRPETPRPVDIGSGGFGDVGALESLRGNADLAYILSMEPCGHCLIINNVNFCRESGLRTRTGSNIDCEKLRRRFSSLHFMVEVKGDLTAKKMVLALLELAQQDHGALDCCVVVILSHGCQASHLQFPGAVYGTDGCPVSVEKIVNIFNGTSCPSLGGKPKLFFIQACGGEQKDHGFEVASTSPEDESPGSNPEPDATPFQEGLRTFDQLDAISSLPTPSDIFVSYSTFPGFVSWRDPKSGSWYVETLDDIFEQWAHSEDLQSLLLRVANAVSVKGIYKQMPGCFNFLRKKLFFKTS

SEQ ID NO: 16528 - protein, 452 aa, Homo Sapiens
MAAPSAGSWSTFQHKELMAADRGRRILGVCGMHPHHQETLKKNRVVLAKQLLLSELLEHLLEKDIITLEMRELIQAKVGSFSQNVELLNLLPKRGPQAFDAFCEALRETKQGHLEDMLLTTLSGLQHVLPPLSCDYDLSLPFPVCESCPLYKKLRLSTDTVEHSLDNKDGPVCLQVKPCTPEFYQTHFQLAYRLQSRPRGLALVLSNVHFTGEKELEFRSGGDVDHSTLVTLFKLLGYDVHVLCDQTAQEMQEKLQNFAQLPAHRVTDSCIVALLSHGVEGAIYGVDGKLLQLQEVFQLFDNANCPSLQNKPKMFFIQACRGDETDRGVDQQDGKNHAGSPGCEESDAGKEKLPKMRLPTRSDMICGYACLKGTAAMRNTKRGSWYIEALAQVFSERACDMHVADMLVKVNALIKDREGYAPGTEFHRCKEMSEYCSTLCRHLYLFPGHPPT

SEQ ID NO: 16529 - protein, 479 aa, Homo Sapiens
MDFSRNLYDIGEQLDSEDLASLKFLSLDYIPQRKQEPIKDALMLFQRLQEKRMLEESNLSFLKELLFRINRLDLLITYLNTRKEEMERELQTPGRAQISAYRVMLYQISEEVSRSELRSFKFLLQEEISKCKLDDDMNLLDIFIEMEKRVILGEGKLDILKRVCAQINKSLLKIINDYEEFSKERSSSLEGSPDEFSNGEELCGVMTISDSPREQDSESQTLDKVYQMKSKPRGYCLIINNHNFAKAREKVPKLHSIRDRNGTHLDAGALTTTFEELHFEIKPHDDCTVEQIYEILKIYQLMDHSNMDCFICCILSHGDKGIIYGTDGQEAPIYELTSQFTGLKCPSLAGKPKVFFIQACQGDNYQKGIPVETDSEEQPYLEMDLSSPQTRYIPDEADFLLGMATVNNCVSYRNPAEGTWYIQSLCQSLRERCPRGDDILTILTEVNYEVSNKDDKKNMGKQMPQPTFTLRKKLVFPSD

SEQ ID NO: 16530 - protein, 521 aa, Homo Sapiens
MKSQGQHWYSSSDKNCKVSFREKLLIIDSNLGVQDVENLKFLCIGLVPNKKLEKSSSASDVFEHLLAEDLLSEEDPFFLAELLYIIRQKKLLQHLNCTKEEVERLLPTRQRVSLFRNLLYELSEGIDSENLKDMIFLLKDSLPKTEMTSLSFLAFLEKQGKIDEDNLTCLEDLCKTVVPKLLRNIEKYKREKAIQIVTPPVDKEAESYQGEEELVSQTDVKTFLEALPQESWQNKHAGSNGNRATNGAPSLVSRGMQGASANTLNSETSTKRAAVYRMNRNHRGLCVIVNNHSFTSLKDRQGTHKDAEILSHVFQWLGFTVHIHNNVTKVEMEMVLQKQKCNPAHADGDCFVFCILTHGRFGAVYSSDEALIPIREIMSHFTALQCPRLAEKPKLFFIQACQGEEIQPSVSIEADALNPEQAPTSLQDSIPAEADFLLGLATVPGYVSFRHVEEGSWYIQSLCNHLKKLVPRMLKFLEKTMEIRGRKRTVWGAKQISATSLPTAISAQTPRPPMRRWSSVS

SEQ ID NO: 16531 - protein, 277 aa, Homo Sapiens
MENTENSVDSKSIKNLEPKIIHGSESMDSGISLDNSYKMDYPEMGLCIIINNKNFHKSTGMTSRSGTDVDAANLRETFRNLKYEVRNKNDLTREEIVELMRDVSKEDHSKRSSFVCVLLSHGEEGIIFGTNGPVDLKKITNFFRGDRCRSLTGKPKLFIIQACRGTELDCGIETDSGVDDDMACHKIPVEADFLYAYSTAPGYYSWRNSKDGSWFIQSLCAMLKQYADKLEFMHILTRVNRKVATEFESFSFDATFHAKKQIPCIVSMLTKELYFYH

SEQ ID NO: 16532 - protein, 293 aa, Homo Sapiens
MSSASGLRRGHPAGGEENMTETDAFYKREMFDPAEKYKMDHRRRGIALIFNHERFFWHLTLPERRGTCADRDNLTRRFSDLGFEVKCFNDLKAEELLLKIHEVSTVSHADADCFVCVFLSHGEGNHIYAYDAKIEIQTLTGLFKGDKCHSLVGKPKIFIIQACRGNQHDVPVIPLDVVDNQTEKLDTNITEVDAASVYTLPAGADFLMCYSVAEGYYSHRETVNGSWYIQDLCEMLGKYGSSLEFTELLTLVNRKVSQRRVDFCKDPSAIGKKQVPCFASMLTKKLHFFPKSN

SEQ ID NO: 16533 - protein, 303 aa, Homo Sapiens
MADDQGCIEEQGVEDSANEDSVDAKPDRSSFVPSLFSKKKKNVTMRSIKTTRDRVPTYQYNMNFEKLGKCIIINNKNFDKVTGMGVRNGTDKDAEALFKCFRSLGFDVIVYNDCSCAKMQDLLKKASEEDHTNAACFACILLSHGEENVIYGKDGVTPIKDLTAHFRGDRCKTLLEKPKLFFIQACRGTELDDGIQADSGPINDTDANPRYKIPVEADFLFAYSTVPGYYSWRSPGRGSWFVQALCSILEEHGKDLEIMQILTRVNDRVARHFESQSDDPHFHEKKQIPCVVSMLTKELYFSQ

SEQ ID NO: 16534 - protein, 233 aa, Homo Sapiens
MSTESMIRDVELAEEALPKKTGGPQGSRRCLFLSLFSFLIVAGATTLFCLLHFGVIGPQREEFPRDLSLISPLAQAVRSSSRTPSDKPVAHVVANPQAEGQLQWLNRRANALLANGVELRDNQLVVPSEGLYLIYSQVLFKGQGCPSTHVLLTHTISRIAVSYQTKVNLLSAIKSPCQRETPEGAEAKPWYEPIYLGGVFQLEKGDRLSAEINRPDYLDFAESGQVYFGIIAL

SEQ ID NO: 16535 - protein, 249 aa, Homo Sapiens; identical to SEQ ID NO: 13611

SEQ ID NO: 16536 - protein, 129 aa, Homo Sapiens; identical to SEQ ID NO: 13567

SEQ ID NO: 16537 - protein, 281 aa, Homo Sapiens [sequence omitted]

SEQ ID NO: 16538 - protein, 251 aa, Homo Sapiens; identical to SEQ ID NO: 13613

SEQ ID NO: 16539 - protein, 671 aa, Homo Sapiens
MQPDMSLNVIKMKSSDFLESAELDSGGFGKVSLCFHRTQGLMIMKTVYKGPNCIEHNEALLEEAKMMNRLRHSRVVKLLGVIIEEGKYSLVMEYMEKGNLMHVLKAEMSTPLSVKGRIILEIIEGMCYLHGKGVIHKDLKPENILVDNDFHIKIADLGLASFKMWSKLNNEEHNELREVDGTAKKNGGTLYYMAPEHLNDVNAKPTEKSDVYSFAVVLWAIFANKEPYENAICEQQLIMCIKSGNRPDVDDITEYCPREIISLMKLCWEANPEARPTFPGIEEKFRPFYLSQLEESVEEDVKSLKKEYSNENAVVKRMQSLQLDCVAVPSSRSNSATEQPGSLHSSQGLGMGPVEESWFAPSLEHPQEENEPSLQSKLQDEANYHLYGSRMDRQTKQQPRQNVAYNREEERRRRVSHDPFAQQRPYENFQNTEGKGTAYSSAASHGNAVHQPSGLTSQPQVLYQNNGLYSSHGFGTRPLDPGTAGPRVWYRPIPSHMPSLHNIPVPETNYLGNTPTMPFSSLPPTDESIKYTIYNSTGIQIGAYNYMEIGGTSSSLLDSTNTNFKEEPAAKYQAIFDNTTSLTDKHLDPIRENLGKHWKNCARKLGFTQSQIDEIDHDYERDGLKEKVYQMLQKWVMREGIKGATVGKLAQALHQCSRIDLLSSLIYVSQN

SEQ ID NO: 16540 - protein, 616 aa, Homo Sapiens
MEILQNSPFLRGLCRTSAPADLQYDNTSELFRISTFAKFPSTAPVTERSLARAGFFYTGICDRVQCFRCNVTIDNWQTGECPAERHKQMSPNCAFIQSLPSTANLLSSSHSAFSPLRNATILQLNLPAVTSASGQTDEQVGYLNMSNLAPSSPLSSRGVEDMSHQRPSACHNPSMRREQDRLDTFQNWTLTTITPAELAKAGFYYLSQGDRVACFSCGGHLSNWEPGDRAMSEHQRHYPNCRFVRGDRADNISIAGGLANVSNPAMQQCEERLLTFVNWPARIPVRPDQLAKAGFYYVGRNDDVKCFCCDGGLRCWESGDDPWVEHAKWFPRCEYLLQEKGQEFVHQIQARFPRLFEQLLNNGDSREFVDPPVVHLGPGEERSEDAVMMNTPVVKAALEMGFDRNLVKQTVQSKILTSGENYKTVQELVSDLLSAEDEKREEEREMFAEEMASDGFTFLKKHHAALTQRLKSVQSLMDHLLEENVISQKEYDTIRNCTSVKQQTGQLIDLVLSKGNAAAEVFRNWIKKNDVYLLRELMAQTNEAVSPSQDLSDLPMEEQLRRLQEERTCKVCMDKEVNIVFIPCGHLVVCKECAPSLRKCPICRGMVKGTVRTFLS

SEQ ID NO: 16541 - protein, 501 aa, Homo Sapiens
MAAASVTPPGSLELLQPGFSKTLLGTKLEAKYLCSACRNVLRRPFQAQCGHRYCSFCLASILSSGPQNCAACVHEGIYEEGISILESSSAFPDNAARREVESLPAVCPSDGCTWKGTLKEYESCHEGRCPLMLTECPACKGLVRLGEKERHLEHECPERSLSCRHCRAPCCGADVKAHHEVCPKFPLTCDGCGKKKIPREKFQDHVKTCGKCRVPCRFHAIGCLETVEGEKQQEHEVQWLREHLAMLLSSVLEAKPLLGDQSHAGSELLQRCESLEKKTATFENIVCVLNREVERVAMTAEACSRQHRLDQDKIEALSSKVQQLERSIGLKDLAMADLEQKVLEMEASTYDGVFIWKISDFARKRQEAVAGRIPAIFSPAFYTSRYGYKMCLRIYLNGDGTGRGTHLSLFFVVMKGPNDALLRWPFNQKVTLMLLDQNNREHVIDAFRPDVTSSSFQRPVNDMNIASGCPLFCPVSKMEAKNSYVRDDAIFIKAIVDLTGL

SEQ ID NO: 16542 - protein, 826 aa, Homo Sapiens; identical to SEQ ID NO: 15084

SEQ ID NO: 16543 - protein, 213 aa, Homo Sapiens
MPRRAENWDEAEVGAEEAGVEEYGPEEDGGEESGAEESGPEESGPEELGAEEEMEAGRPRPVLRSVNSREPSQVIFCNRSPRVVLPVWLNFDGEPQPYPTLPPGTGRRIHSYRGHLWLFRDAGTHDGLLVNQTELFVPSLNVDGQPIFANITLPVYTLKERCLQVVRSLVKPENYRRLDIVRSLYEDLEDHPNVQKDLERLTQERIAHQRMGD

SEQ ID NO: 16544 - protein, 492 aa, Homo Sapiens
MEPSSKKLTGRLMLAVGGAVLGSLQFGYNTGVINAPQKVIEEFYNQTWVHRYGESILPTTLTTLWSLSVAIFSVGGMIGSFSVGLFVNRFGRRNSMLMMNLLAFVSAVLMGFSKLGKSFEMLILGRFIIGVYCGLTTGFVPMYVGEVSPTALRGALGTLHQLGIVVGILIAQVFGLDSIMGNKDLWPLLLSIIFIPALLQCIVLPFCPESPRFLLINRNEENRAKSVLKKLRGTADVTHDLQEMKEESRQMMREKKVTILELFRSPAYRQPILIAVVLQLSQQLSGINAVFYYSTSIFEKAGVQQPVYATIGSGIVNTAFTVVSLFVVERAGRRTLHLIGLAGMAGCAILMTIALALLEQLPWMSYLSIVAIFGFVAFFEVGPGPIPWFIVAELFSQGPRPAAIAVAGFSNWTSNFIVGMCFQYVEQLCGPYVFIIFTVLLVLFFIFTYFKVPETKGRTFDEIASGFRQGGASQSDKTPEELFHPLGADSQV

SEQ ID NO: 16545 - protein, 262 aa, Homo Sapiens; identical to SEQ ID NO: 7713

SEQ ID NO: 16546 - protein, 630 aa, Homo Sapiens
MELQPPEASIAVVSIPRQLPGSHSEAGVQGLSAGDDSELGSHCVAQTGLELLASGDPLPSASQNAEMIETGSDCVTQAGLQLLASSDPPALASKNAEVTGTMSQDTEVDMKEVELNELEPEKQPMNAASGAAMSLAGAEKNGLVKIKVAEDEAEAAAAAKFTGLSKEELLKVAGSPGWVRTRWALLLLFWLGWLGMLAGAVVIIVRAPRCRELPAQKWWHTGALYRIGDLQAFQGHGAGNLAGLKGRLDYLSSLKVKGLVLGPIHKNQKDDVAQTDLLQIDPNFGSKEDFDSLLQSAKKKSIRVILDLTPNYRGENSWFSTQVDTVATKVKDALEFWLQAGVDGFQVRDIENLKDASSFLAEWQNITKGFSEDRLLIAGTNSSDLQQILSLLESNKDLLLTSSYLSDSGSTGEHTKSLVTQYLNATGNRWCSWSLSQARLLTSFLPAQLLRLYQLMLFTLPGTPVFSYGDEIGLDAAALPGQPMEAPVMLWDESSFPDIPGAVSANMTVKGQSEDPGSLLSLFRRLSDQRSKERSLLHGDFHAFSAGPGLFSYIRHWDQNERFLVVLNFGDVGLSAGLQASDLPASASLPAKADLLLSTQPGREEGSPLELERLKLEPHEGLLLRFPYAA

SEQ ID NO: 16547 - protein, 541 aa, Homo Sapiens
MVADPPRDSKGLAAAEPTANGGLALASIEDQGAAAGGYCGSRDQVRRCLRANLLVLLTVVAVVAGVALGLGVSGAGGALALGPERLSAFVFPGELLLRLLRMIILPLVVCSLIGGAASLDPGALGRLGAWALLFFLVTTLLASALGVGLALALQPGAASAAINASVGAAGSAENAPSKEVLDSFLDLARNIFPSNLVSAAFRSYSTTYEERNITGTRVKVPVGQEVEGMNILGLVVFAIVFGVALRKLGPEGELLIRFFNSFNEATMVLVSWIMWYAPVGIMFLVAGKIVEMEDVGLLFARLGKYILCCLLGHAIHGLLVLPLIYFLFTRKNPYRFLWGIVTPLATAFGTSSSSATLPLMMKCVEENNGVAKHISRFILPIGATVNMDGAALFQCVAAVFIAQLSQQSLDFVKIITILVTATASSVGAAGIPAGGVLTLAIILEAVNLPVDHISLILAVDWLVDRSCTVLNVEGDALGAGLLQNYVDRTESRSTEPELIQVKSELPLDPLPVPTEEGNPLLKHYRGPAGDATVASEKESVM

SEQ ID NO: 16548 - protein, 629 aa, Homo Sapiens
MGCKVLLNIGQQMLRRKVVDCSREETRLSRCLNTFDLVALGVGSTLGAGVYVLAGAVARENAGPAIVISFLIAALASVLAGLCYGEFGARVPKTGSAYLYSYVTVGELWAFITGWNLILSYIIGTSSVARAWSATFDELIGRPIGEFSRTHMTLNAPGVLAENPDIFAVIIILILTGLLTLGVKESAMVNKIFTCINVLVLGFIMVSGFVKGSVKNWQLTEEDFGNTSGRLCLNNDTKEGKPGVGGFMPFGFSGVLSGAATCFYAFVGFDCIATTGEEVKNPQKAIPVGIVASLLICFIAYFGVSAALTLMMPYFCLDNNSPLPDAFKHVGWEGAKYAVAVGSLCALSASLLGSMFPMPRVIYAMAEDGLLFKFLANVNDRTKTPIIATLASGAVAAVMAFLFDLKDLVDLMSIGTLLAYSLVAACVLVLRYQPEQPNLVYQMASTSDELDPADQNELASTNDSQLGFLPEAEMFSLKTILSPKNMEPSKISGLIVNISTSLIAVLIITFCIVTVLGREALTKGALWAVFLLAGSALLCAVVTGVIWRQPESKTKLSFKVPFLPVLPILSIFVNVYLMMQLDQGTWVRFAVWMLIGFIIYFGYGLWHSEEASLDADQARTPDGNLDQCK

SEQ ID NO: 16549 - protein, 658 aa, Homo Sapiens
MIPCRAALTFARCLIRRKIVTLDSLEDTKLCRCLSTMDLIALGVGSTLGAGVYVLAGEVAKADSGPSIVVSFLIAALASVMAGLCYAEFGARVPKTGSAYLYTYVTVGELWAFITGWNLILSYVIGTSSVARAWSGTFDELLSKQIGQFLRTYFRMNYTGLAEYPDFFAVCLILLLAGLLSFGVKESAWVNKVFTAVNILVLLFVMVAGFVKGNVANWKISEEFLKNISASAREPPSENGTSIYGAGGFMPYGFTGTLAGAATCFYAFVGFDCIATTGEEVRNPQKAIPIGIVTSLLVCFMAYFGVSAALTLMMPYYLLDEKSPLPVAFEYVGWGPAKYVVAAGSLCALSTSLLGSIFPMPRVIYAMAEDGLLFKCLAQINSKTKTPIIATLSSGAVAALMAFLFDLKALVDMMSIGTLMAYSLVAACVLILRYQPGLSYDQPKCSPEKDGLGSSPRVTSKSESQVTMLQRQGFSMRTLFCPSLLPTQQSASLVSFLVGFLAFLVLGLSVLTTYGVHAITRLEAWSLALLALFLVLFVAIVLTIWRQPQNQQKVAFMVPFLPFLPAFSILVNIYLMVQLSADTWVRFSIWMAIGFLIYFSYGIRHSLEGHLRDENNEEDAYPDNVHAAAEEKSAIQANDHHPRNLSSPFIFHEKTSEF

SEQ ID NO: 16550 - protein, 619 aa, Homo Sapiens
MPWQAFRRFGQKLVRRRTLESGMAETRLARCLSTLDLVALGVGSTLGAGVYVLAGEVAKDKAGPSIVICFLVAALSSVLAGLCYAEFGARVPRSGSAYLYSYVTVGELWAFTTGWNLILSYVIGTASVARAWSSAFDNLIGNHISKTLQGSIALHVPHVLAEYPDFFALGLVLLLTGLLALGASESALVTKVFTGVNLLVLGFVMISGFVKGDVHNWKLTEEDYELAMAELNDTYSLGPLGSGGFVPFGFEGILRGAATCFYAFVGFDCIATTGEEAQNPQRSIPMGIVISLSVCFLAYFAVSSALTLMMPYYQLQPESPLPEAFLYIGWAPARYVVAVGSLCALSTSLLGSMFPMPRVIYAMAEDGLLFRVLARIHTGTRTPIIATVVSGIIAAFMAFLFKLTDLVDLMSIGTLLAYSLVSICVLILRYQPDQETKTGEEVELQEEAITTESEKLTLWGLFFPLNSIPTPLSGQIVYVCSSLLAVLLTALCLVLAQWSVPLLSGDLLWTAVVVLLLLLIIGIIVVIWRQPQSSTPLHFKVPALPLLPLMSIFVNIYLMMQMTAGTWARFGVWMLIGFAIYFGYGIQHSLEEIKSNQPSRKSRAKTVDLDPGTLYVHSV

SEQ ID NO: 16551 - protein, 635 aa, Homo Sapiens
MARGLPTIASLARLCQKLNRLKPLEDSTMETSLRRCLSTLDLTLLGVGGMVGSGLYVLTGAVAKEVAGPAVLLSFGVAAVASLLAALCYAEFGARVPRTGSAYLFTYVSMGELWAFLIGWNVLLEYIIGGAAVARAWSGYLDSMFSHSIRNFTETHVGSWQVPLLGHYPDFLAAGIILLASAFVSCGARVSSWLNHTFSAISLLVILFIVILGFILAQPHNWSADEGGFAPFGFSGVMAGTASCFYAFVGFDVIAASSEEAQNPRRSVPLAIAISLAIAAGAYILVSTVLTLMVPWHSLDPDSALADAFYQRGYRWAGFIVAAGSICAMNTVLLSLLFSLPRIVYAMAADGLFFQVFAHVHPRTQVPVAGTLAFGLLTAFLALLLDLESLVQFLSLGTLLAYTFVATSIIVLRFQKSSPPSSPGPASPGPLTKQQSSFSDHLQLVGTVHASVPEPGELKPALRPYLGFLDGYSPGAVVTWALGVMLASAITIGCVLVFGNSTLHLPHWGYILLLLLTSVMFLLSLLVLGAHQQQYREDLFQIPMVPLIPALSIVLNICLMLKLSYLTWVRFSIWLLMGLAVYFGYGIRHSKENQRELPGLNSTHYVVFPRGSLEETVQAMQPPSQAPAQDPGHME

SEQ ID NO: 16552 - protein, 507 aa, Homo Sapiens
MAGAGPKRRALAAPAAEEKEEAREKMLAAKSADGSAPAGEGEGVTLQRNITLLNGVAIIVGTIIGSGIFVTPTGVLKEAGSPGLALVVWAACGVFSIVGALCYAELGTTISKSGGDYAYMLEVYGSLPAFLKLWIELLIIRPSSQYIVALVFATYLLKPLFPTCPVPEEAAKLVACLCVLLLTAVNCYSVKAATRVQDAFAAAKLLALALIILLGFVQIGKGDVSNLDPNFSFEGTKLDVGNIVLALYSGLFAYGGWNYLNFVTEEMINPYRNLPLAIIISLPIVTLVYVLTNLAYFTTLSTEQMLSSEAVAVDFGNYHLGVMSWIIPVFVGLSCFGSVNGSLFTSSRLFFVGSREGHLPSILSMIHPQLLTPVPSLVFTCVMTLLYAFSKDIFSVINFFSFFNWLCVALAIIGMIWLRHRKPELERPIKVNLALPVFFILACLFLIAVSFWKTPVECGIGFTIILSGLPVYFFGVWWKNKPKWLLQGIFSTTVLCQKLMQVVPQET

SEQ ID NO: 16553 - protein, 515 aa, Homo Sapiens
MEAREPGRPTPTYHLVPNTSQSQVEEDVSSPPQRSSETMQLKKEISLLNGVSLVVGNMIGSGIFVSPKGVLVHTASYGMSLIVWAIGGLFSVVGALCYAELGTTITKSGASYAYILEAFGGFIAFIRLWVSLLVVEPTGQAIIAITFANYIIQPSFPSCDPPYLACRLLAAACICLLTFVNCAYVKWGTRVQDTFTYAKVVALIAIIVMGLVKLCQGHSEHFQDAFEGSSWDMGNLSLALYSALFSYSGWDTLNFVTEEIKNPERNLPLAIGISMPIVTLIYILTNVAYYTVLNISDVLSSDAVAVTFADQTFGMFSWTIPIAVALSCFGGLNASIFASSRLFFVGSREGHLPDLLSMIHIERFTPIPALLFNCTMALIYLIVEDVFQLINYFSFSYWFFVGLSVVGQLYLRWKEPKRPRPLKLSVFFPIVFCICSVFLVIVPLFTDTINSLIGIGIALSGVPFYFMGVYLPESRRPLFIRNVLAAITRGTQQLCFCVLTELDVAEEKKDERKTD

SEQ ID NO: 16554 - protein, 511 aa, Homo Sapiens
MVDSTEYEVASQPEVETSPLGDGASPGPEQVKLKKEISLLNGVCLIVGNMIGSGIFVSPKGVLIYSASFGLSLVIWAVGGLFSVFGALCYAELGTTIKKSGASYAYILEAFGGFLAFIRLWTSLLIIEPTSQAIIAITFANYMVQPLFPSCFAPYAASRLLAAACICLLTFINCAYVKWGTLVQDIFTYAKVLALIAVIVAGIVRLGQGASTHFENSFEGSSFAVGDIALALYSALFSYSGWDTLNYVTEEIKNPERNLPLSIGISMPIVTIIYILTNVAYYTVLDMRDILASDAVAVTFADQIFGIFNWIIPLSVALSCFGGLNASIVAASRLFFVGSREGHLPDAICMIHVERFTPVPSLLFNGIMALIYLCVEDIFQLINYYSFSYWFFVGLSIVGQLYLRWKEPDRPRPLKLSVFFPIVFCLCTIFLVAVPLYSDTINSLIGIAIALSGLPFYFLIIRVPEHKRPLYLRRIVGSATRYLQVLCMSVAAEMDLEDGGEMPKQRDPKSN

SEQ ID NO: 16555 - protein, 535 aa, Homo Sapiens
MEEGARHRNNTEKKHPGGGESDASPEAGSGGGGVALKKEIGLVSACGIIVGNIIGSGIFVSPKGVLENAGSVGLALIVWIVTGFITVVGALCYAELGVTIPKSGGDYSYVKDIFGGLAGFLRLWIAVLVIYPTNQAVIALTFSNYVLQPLFPTCFPPESGLRLLAAICLLLLTWVNCSSVRWATRVQDIFTAGKLLALALIIIMGIVQICKGEYFWLEPKNAFENFQEPDIGLVALAFLQGSFAYGGWNFLNYVTEELVDPYKNLPRAIFISIPLVTFVYVFANVAYVTAMSPQELLASNAVAVTFGEKLLGVMAWIMPISVALSTFGGVNGSLFTSSRLFFAGAREGHLPSVLAMIHVKRCTPIPALLFTCISTLLMLVTSDMYTLINYVGFINYLFYGVTVAGQIVLRWKKPDIPRPIKINLLFPIIYLLFWAFLLVFSLWSEPVVCGIGLAIMLTGVPVYFLGVYWQHKPKCFSDFIELLTLVSQKMCVVVYPEVERGSGTEEANEDMEEQQQPMYQPTPTKDKDVAGQPQP

SEQ ID NO: 16556 - protein, 487 aa, Homo Sapiens
MGDTGLRKRREDEKSIQSQEPKTTSLQKELGLISGISIIVGTIIGSGIFVSPKSVLSNTEAVGPCLIIWAACGVLATLGALCFAELGTMITKSGGEYPYLMEAYGPIPAYLFSWASLIVIKPTSFAIICLSFSEYVCAPFYVGCKPPQIVVKCLAAAAILFISTVNSLSVRLGSYVQNIFTAAKLVIVAIIIISGLVLLAQGNTKNFDNSFEGAQLSVGAISLAFYNGLWAYDGWNQLNYITEELRNPYRNLPLAIIIGIPLVTACYILMNVSYFTVMTATELLQSQAVAVTFGDRVLYPASWIVPLFVAFSTIGAANGTCFTAGRLIYVAGREGHMLKVLSYISVRRLTPAPAIIFYGIIATIYIIPGDINSLVNYFSFAAWLFYGLTILGLIVMRFTRKELERPIKVPVVIPVLMTLISVFLVLAPIISKPTWEYLYCVLFILSGLLFYFLFVHYKFGWAQKISKPITMHLQMLMEVVPPEEDPE

SEQ ID NO: 16557 - protein, 523 aa, Homo Sapiens
MAGHTQQPSGRGNPRPAPSPSPVPGTVPGASERVALKKEIGLLSACTIIIGNIIGSGIFISPKGVLEHSGSVGLALFVWVLGGGVTALGSLCYAELGVAIPKSGGDYAYVTEIFGGLAGFLLLWSAVLIMYPTSLAVISMTFSNYVLQPVFPNCIPPTTASRVLSMACLMLLTWVNSSSVRWATRIQDMFTGGKLLALSLIIGVGLLQIFQGHFEELRPSNAFAFWMTPSVGHLALAFLQGSFAFSGWNFLNYVTEEMVDARKNLPRAIFISIPLVTFVYTFTNIAYFTAMSPQELLSSNAVAVTFGEKLLGYFSWVMPVSVALSTFGGINGYLFTYSRLCFSGAREGHLPSLLAMIHVRHCTPIPALLVCCGATAVIMLVGDTYTLINYVSFINYLCYGVTILGLLLLRWRRPALHRPIKVNLLIPVAYLVFWAFLLVFSFISEPMVCGVGVIIILTGVPIFFLGVFWRSKPKCVHRLTESMTHWGQELCFVVYPQDAPEEEENGPCPPSLLPATDKPSKPQ

SEQ ID NO: 16558 - protein, 501 aa, Homo Sapiens
MVRKPVVSTISKGGYLQGNVNGRLPSLGNKEPPGQEKVQLKRKVTLLRGVSIIIGTIIGAGIFISPKGVLQNTGSVGMSLTIWTVCGVLSLFGALSYAELGTTIKKSGGHYTYILEVFGPLPAFVRVWVELLIIRPAATAVISLAFGRYILEPFFIQCEIPELAIKLITAVGITVVMVLNSMSVSWSARIQIFLTFCKLTAILIIIVPGVMQLIKGQTQNFKDAFSGRDSSITRLPLAFYYGMYAYAGWFYLNFVTEEVENPEKTIPLAICISMAIVTIGYVLTNVAYFTTINAEELLLSNAVAVTFSERLLGNFSLAVPIFVALSCFGSMNGGVFAVSRLFYVASREGHLPEILSMIHVRKHTPLPAVIVLHPLTMIMLFSGDLDSLLNFLSFARWLFIGLAVAGLIYLRYKCPDMHRPFKVPLFIPALFSFTCLFMVALSLYSDPFSTGIGFVITLTGVPAYYLFIIWDKKPRWFRIMSEKITRTLQIILEVVPEEDKL

SEQ ID NO: 16559 - protein, 470 aa, Homo Sapiens
MDRGEKIQLKRVFGYWWGTSFLLINIIGAGIFVSPKGVLAYSCMNVGVSLCVWAGCAILAMTSTLCSAEISISFPCSGAQYYFLKRYFGSTVAFLNLWTSLFLGSGVVAGQALLLAEYSIQPFFPSCSVPKLPKKCLALAMLWIVGILTSRGVKEVTWLQIASSVLKVSILSFISLTGVVFLIRGKKENVERFQNAFDAELPDISHLIQAIFQGYFAYSGGACFTLIAGELKKPRTTIPKCIFTALPLVTVVYLLVNISYLTVLTPREILSSDAVAITWADRAFPSLAWIMPFAISTSLFSNLLISIFKSSRPIYLASQEGQLPLLFNTLNSHSSPFTAVLLLVTLGSLAIILTSLIDLINYIFFTGSLWSILLMIGILRRRYQEPNLSIPYKVFLSFPLATIVIDVGLVVIPLVKSPNVHYVYVLLLVLSGLLFYIPLIHFKIRLAWFEKMTCYLQLLFNICLPDVSEE

SEQ ID NO: 16560 - protein, 771 aa, Homo Sapiens
MSGFFTSLDPRRVQWGAAWYAMHSRILRTKPVESMLEGTGTTTAHGTKLAQVLTTVDLISLGVGSCVGTGMYVVSGLVAKEMAGPGVIVSFIIAAVASILSGVCYAEFGVRVPKTTGSAYTYSYVTVGEFVAFFIGWNLILEYLIGTAAGASALSSMFDSLANHTISRWMADSVGTLNGLGKGEESYPDLLALLIAVIVTIIVALGVKNSIGFNNVLNVLNLAVWVFIMIAGLFFINGKYWAEGQFLPHGWSGVLQGAATCFYAFIGFDIIATTGEEAKNPNTSIPYAITASLVICLTAYVSVSVILTLMVPYYTIDTESPLMEMFVAHGFYAAKFVVAIGSVAGLTVSLLGSLFPMPRVIYAMAGDGLLFRFLAHVSSYTETPVVACIVSGFLAALLALLVSLRDLIEMMSIGTLLAYTLVSVCVLLLRYQPESDIDGFVKFLSEEHTKKKEGILADCEKEACSPVSEGDEFSGPATNTCGAKNLPSLGDNEMLIGKSDKSTYNVNHPNYGTVDMTTGIEADESENIYLIKLKKLIGPHYYTMRIRLGLPGKMDRPTAATGHTVTICVLLLFILMFIFCSFIIFGSDYISEQSWWAILLVVLMVLLISTLVFVILQQPENPKKLPYMAPCLPFVPAFAMLVNIYLMLKLSTITWIRFAVWCFVGLLIYFGYGIWNSTLEISAREEALHQSTYQRYDVDDPFSVEEGFSYATEGESQEDWGGPTEDKGFYYQQMSDAKANGRTSSKAKSKSKHKQNSEALIANDELDYSPE

SEQ ID NO: 16561 - protein, 630 aa, Homo Sapiens; identical to SEQ ID NO: 16546

SEQ ID NO: 16562 - protein, 658 aa, Homo Sapiens; identical to SEQ ID NO: 16549

SEQ ID NO: 16563 - protein, 619 aa, Homo Sapiens; identical to SEQ ID NO: 16550

SEQ ID NO: 16564 - protein, 635 aa, Homo Sapiens; identical to SEQ ID NO: 16551

SEQ ID NO: 16565 - protein, 1483 aa, Homo Sapiens
MAPLLGRKPFPLVKPLPGEEPLFTIPHTQEAFRTREEYEARLERYSERIWTCKSTGSSQLTHKEAWEEEQEVAELLKEEFPAWYEKLVLEMVHHNTASLEKLVDTAWLEIMTKYAVGEECDFEVGKEKMLKVKIVKIHPLEKVDEEATEKKSDGACDSPSSDKENSSQIAQDHQKKETVVKEDEGRRESINDRARRSPRKLPTSLKKGERKWAPPKFLPHKYDVKLQNEDKIISNVPADSLIRTERPPNKEIVRYFIRHNALRAGTGENAPWVVEDELVKKYSLPSKFSDFLLDPYKYMTLNPSTKRKNTGSPDRKPSKKSKTDNSSLSSPLNPKLWCHVHLKKSLSGSPLKVKNSKNSKSPEEHLEEMMKMMSPNKLHTNFHIPKKGPPAKKPGKHSDKPLKAKGRSKGILNGQKSTGNSKSPKKGLKTPKTKMKQMTLLDMAKGTQKMTRAPRNSGGTPRTSSKPHKHLPPAALHLIAYYKENKDREDKRSALSCVISKTARLLSSEDRARLPEELRSLVQKRYELLEHKKRWASMSEEQRKEYLKKKREELKKKLKEKAKERREKEMLERLEKQKRYEDQELTGKNLPAFRLVDTPEGLPNTLFGDVAMVVEFLSCYSGLLLPDAQYPITAVSLMEALSADKGGFLYLNRVLVILLQTLLQDEIAEDYGELGMKLSEIPLTLHSVSELVRLCLRRSDVQEESEGSDTDDNKDSAAFEDNEVQDEFLEKLETSEFFELTSEEKLQILTALCHRILMTYSVQDHMETRQQMSAELWKERLAVLKEENDKKRAEKQKRKEMEAKNKENGKVENGLGKTDRKKEIVKFEPQVDTEAEDMISAVKSRRLLAIQAKKEREIQEREMKVKLERQAEEERIRKHKAAAEKAFQEGIAKAKLVMRRTPIGTDRNHNRYWLFSDEVPGLFIEKGWVHDSIDYRFNHHCKDHTVSGDEDYCPRSKKANLGKNASMNTQHGTATEVAVETTTPKQGQNLWFLCDSQKELDELLNCLHPQGIRESQLKERLEKRYQDIIHSIHLARKPNLGLKSCDGNQELLNFLRSDLIEVATRLQKGGLGYVEETSEFEARVISLEKLKDFGECVIALQASVIKKFLQGFMAPKQKRRKLQSEDSAKTEEVDEEKKMVEEAKVASALEKWKTAIREAQTFSRMHVLLGMLDACIKWDMSAENARCKVCRKKGEDDKLILCDECNKAFHLFCLRPALYEVPDGEWQCPACQPATARRNSRGRNYTEESASEDSEDDESDEEEEEEEEEEEEEDYEVAGLRLRPRKTIRGKHSVIPPAARSGRRPGKKPHSTRRSQPKAPPVDDAEVDELVLQTKRSSRRQSLELQKCEEILHKIVKYRFSWPFREPVTRDEAEDYYDVITHPMDFQTVQNKCSCGSYRSVQEFLTDMKQVFTNAEVYNCRGSHVLSCMVKTEQCLVALLHKHLPGHPYVRRKRKKFPDRLAEDEGDSEPEAVGQSRGRRQKK

SEQ ID NO: 16566 - protein, 530 aa, Homo Sapiens
MTRDFKPGDLIFAKMKGYPHWPARVDEVPDGAVKPPTNKLPIFFFGTHETAFLGPKDIFPYSENKEKYGKPNKRKGFNEGLWEIDNNPKVKFSSQQAATKQSNASSDVEVEEKETSVSKEDTDHEEKASNEDVTKAVDITTPKAARRGRKRKAEKQVETEEAGVVTTATASVNLKVSPKRGRPAATEVKIPKPRGRPKMVKQPCPSESDIITEEDKSKKKGQEEKQPKKQPKKDEEGQKEEDKPRKEPDKKEGKKEVESKRKNLAKTGVTSTSDSEEEGDDQEGEKKRKGGRNFQTAHRRNMLKGQHEKEAADRKRKQEEQMETEQQNKDEGKKPEVKKVEKKRETSMDSRLQRIHAEIKNSLKIDNLDVNRCIEALDELASLQVTMQQAQKHTEMITTLKKIRRFKVSQVIMEKSTMLYNKFKNMFLVGEGDSVITQVLNKSLAEQRQHEEANKTKDQGKKGPNKKLEKEQTGSKTLNGGSDAQDGNQPQHNGESNEDSKDNHEASTKKKPSSEERETEISLKDSTLDN

SEQ ID NO: 16567 - protein, 228 aa, Homo Sapiens
MSVSEIFVELQGFLAAEQDIREEIRKVVQSLEQTAREILTLLQGVHQGAGFQDIPKRCLKAREHFGTVKTHLTSLKTKFPAEQYYRFHEHWRFVLQRLVFLAAFVVYLETETLVTREAVTEILGIEPDREKGFHLDVEDYLSGVLILASELSRLSVNSVTAGDYSRPLHISTFINELDSGFRLLNLKNDSLRKRYDGLKYDVKKVEEVVYDLSIRGFNKETAAACVEK

SEQ ID NO: 16568 - protein, 140 aa, Homo Sapiens; identical to SEQ ID NO: 14672

SEQ ID NO: 16569 - protein, 176 aa, Homo Sapiens; identical to SEQ ID NO: 14673

SEQ ID NO: 16570 - protein, 164 aa, Homo Sapiens; identical to SEQ ID NO: 14674

SEQ ID NO: 16571 - protein, 207 aa, Homo Sapiens; identical to SEQ ID NO: 14675

SEQ ID NO: 16572 - protein, 182 aa, Homo Sapiens; identical to SEQ ID NO: 14676

SEQ ID NO: 16573 - protein, 171 aa, Homo Sapiens; identical to SEQ ID NO: 2330

SEQ ID NO: 16574 - protein, 552 aa, Homo Sapiens
MAEKQKHDGRVKIGHYVLGDTLGVGTFGKVKIGEHQLTGHKVAVKILNRQKIRSLDVVGKIKREIQNLKLFRHPHIIKLYQVISTPTDFFMVMEYVSGGELFDYICKHGRVEEMEARRLFQQILSAVDYCHRHMVVHRDLKPENVLLDAHMNAKIADFGLSNMMSDGEFLRTSCGSPNYAAPEVISGRLYAGPEVDIWSCGVILYALLCGTLPFDDEHVPTLFKKIRGGVFYIPEYLNRSVATLLMHMLQVDPLKRATIKDIREHEWFKQDLPSYLFPEDPSYDANVIDDEAVKEVCEKFECTESEVMNSLYSGDPQDQLAVAYHLIIDNRRIMNQASEFYLASSPPSGSFMDDSAMHIPPGLKPHPERMPPLIADSPKARCPLDALNTTKPKSLAVKKAKWHLGIRSQSKPYDIMAEVYRAMKQLDFEWKVVNAYHLRVRRKNPVTGNYVKMSLQLYLVDNRSYLLDFKSIDDEVVEQRSGSSTPQRSCSAAGLHRPRSSFDSTTAESHSLSGSLTGSLTGSTLSSVSPRLGSHTMDFFEMCASLITTLAR

SEQ ID NO: 16575 - protein, 270 aa, Homo Sapiens
MGNTSSERAALERHGGHKTPRRDSSGGTKDGDRPKILMDSPEDADLFHSEEIKAPEKEEFLAWQHDLEVNDKAPAQARPTVFRWTGGGKEVYLSGSFNNWSKLPLTRSHNNFVAILDLPEGEHQYKFFVDGQWTHDPSEPIVTSQLGTVNNIIQVKKTDFEVFDALMVDSQKCSDVSELSSSPPGPYHQEPYVCKPEERFRAPPILPPHLLQVILNKDTGISCDPALLPEPNHVMLNHLYALSIKDGVMVLSATHRYKKKYVTTLLYKPI

SEQ ID NO: 16576 - protein, 595 aa, Homo Sapiens
MPACCSCSDVFQYETNKVTRIQSMNYGTIKWFFHVIIFSYVCFALVSDKLYQRKEPVISSVHTKVKGIAEVKEEIVENGVKKLVHSVFDTADYTFPLQGNSFFVMTNFLKTEGQEQRLCPEYPTRRTLCSSDRGCKKGWMDPQSKGIQTGRCVVYEGNQKTCEVSAWCPIEAVEEAPRPALLNSAENFTVLIKNNIDFPGHNYTTRNILPGLNITCTFHKTQNPQCPIFRLGDIFRETGDNFSDVAIQGGIMGIEIYWDCNLDRWFHHCRPKYSFRRLDDKTTNVSLYPGYNFRYAKYYKENNVEKRTLIKVFGIRFDILVFGTGGKFDIIQLVVYIGSTLSYFGLAAVFIDFLIDTYSSNCCRSHIYPWCKCCQPCVVNEYYYRKKCESIVEPKPTLKYVSFVDESHIRMVNQQLLGRSLQDVKGQEVPRPAMDFTDLSRLPLALHDTPPIPGQPEEIQLLRKEATPRSRDSPVWCQCGSCLPSQLPESHRCLEELCCRKKPGACITTSELFRKLVLSRHVLQFLLLYQEPLLALDVDSTNSRLRHCAYRCYATWRFGSQDMADFAILPSCCRWRIRKEFPKSEGQYSGFKSPY

SEQ ID NO: 16577 - protein, 1465 aa, Homo Sapiens
MPEQERQITAREGASRKILSKLSLPTRAWEPAMKKSFAFDNVGYEGGLDGLGPSSQVATSTVRILGMTCQSCVKSIEDRISNLKGIISMKVSLEQGSATVKYVPSVVCLQQVCHQIGDMGFEASIAEGKAASWPSRSLPAQEAVVKLRVEGMTCQSCVSSIEGKVRKLQGVVRVKVSLSNQEAVITYQPYLIQPEDLRDHVNDMGFEAAIKSKVAPLSLGPIDIERLQSTNPKRPLSSANQNFNNSETLGHQGSHVVTLQLRIDGMHCKSCVLNIEENIGQLLGVQSIQVSLENKTAQVKYDPSCTSPVALQRAIEALPPGNFKVSLPDGAEGSGTDHRSSSSHSPGSPPRNQVQGTCSTTLIAIAGMTCASCVHSIEGMISQLEGVQQISVSLAEGTATVLYNPSVISPEELRAAIEDMGFEASVVSESCSTNPLGNHSAGNSMVQTTDGTPTSVQEVAPHTGRLPANHAPDILAKSPQSTRAVAPQKCFLQIKGMTCASCVSNIERNLQKEAGVLSVLVALMAGKAEIKYDPEVIQPLEIAQFIQDLGFEAAVMEDYAGSDGNIELTITGMTCASCVHNIESKLTRTNGITYASVALATSKALVKFDPEIIGPRDIIKIIEEIGFHASLAQRNPNAHHLDHKMEIKQWKKSFLCSLVFGIPVMALMIYMLIPSNEPHQSMVLDHNIIPGLSILNLIFFILCTFVQLLGGWYFYVQAYKSLRHRSANMDVLIVLATSIAYVYSLVILVVAVAEKAERSPVTFFDTPPMLFVFIALGRWLEHLAKSKTSEALAKLMSLQATEATVVTLGEDNLIIREEQVPMELVQRGDIVKVVPGGKFPVDGKVLEGNTMADESLITGEAMPVTKKPGSTVIAGSINAHGSVLIKATHVGNDTTLAQIVKLVEEAQMSKAPIQQLADRFSGYFVPFIIIMSTLTLVVWIVIGFIDFGVVQRYFPNPNKHISQTEVIIRFAFQTSITVLCIACPCSLGLATPTAVMVGTGVAAQNGILIKGGKPLEMAHKIKTVMFDKTGTITHGVPRVMRVLLLGDVATLPLRKVLAVVGTAEASSEHPLGVAVTKYCKEELGTETLGYCTDFQAVPGCGIGCKVSNVEGILAHSERPLSAPASHLNEAGSLPAEKDAVPQTFSVLIGNREWLRRNGLTISSDVSDAMTDHEMKGQTAILVAIDGVLCGMIAIADAVKQEAALAVHTLQSMGVDVVLITGDNRKTARAIATQVGINKVFAEVLPSHKVAKVQELQNKGKKVAMVGDGVNDSPALAQADMGVAIGTGTDVAIEAADVVLIRNDLLDVVASIHLSKRTVRRIRINLVLALIYNLVGIPIAAGVFMPIGIVLQPWMGSAAMAASSVSVVLSSLQLKCYKKPDLERYEAQAHGHMKPLTASQVSVHIGMDDRWRDSPRATPWDQVSYVSQVSLSSLTSDKPSRHSAAADDDGDKWSLLLNGRDEEQYI

SEQ ID NO: 16578 - protein, 1271 aa, Homo Sapiens
MVDPVGFAEAWKAQFPDSEPPRMELRSVGDIEQELERCKASIRRLEQEVNQERFRMIYLQTLLAKEKKSYDRQRWGFRRAAQAPDGASEPRASASRPQPAPADGADPPPAEEPEARPDGEGSPGKARPGTARRPGAAASGERDDRGPPASVAALRSNFERIRKGHGQPGADAEKPFYVNVEFHHERGLVKVNDKEVSDRISSLGSQAMQMERKKSQHGAGSSVGDASRPPYRGRSSESSCGVDGDYEDAELNPRFLKDNLIDANGGSRPPWPPLEYQPYQSIYVGGMMEGEGKGPLLRSQSTSEQEKRLTWPRRSYSPRSFEDCGGGYTPDCSSNENLTSSEEDFSSGQSSRVSPSPTTYRMFRDKSRSPSQNSQQSFDSSSPPTPQCHKRHRHCPVVVSEATIVGVRKTGQIWPNDGEGAFHGDADGSFGTPPGYGCAADRAEEQRRHQDGLPYIDDSPSSSPHLSSKGRGSRDALVSGALESTKASELDLEKGLEMRKWVLSGILASEETYLSHLEALLLPMKPLKAAATTSQPVLTSQQIETIFFKVPELYEIHKEFYDGLFPRVQQWSHQQRVGDLFQKLASQLGVYRAFVDNYGVAMEMAEKCCQANAQFAEISENLRARSNKDAKDPTTKNSLETLLYKPVDRVTRSTLVLHDLLKHTPASHPDHPLLQDALRISQNFLSSINEEITPRRQSMTVKKGEHRQLLKDSFMVELVEGARKLRHVFLFTDLLLCTKLKKQSGGKTQQYDCKWYIPLTDLSFQMVDELEAVPNIPLVPDEELDALKIKISQIKNDIQREKRANKGSKATERLKKKLSEQESLLLLMSPSMAFRVHSRNGKSYTFLISSDYERAEWRENIREQQKKCFRSFSLTSVELQMLTNSCVKLQTVHSIPLTINKEDDESPGLYGFLNVIVHSATGFKQSSNLYCTLEVDSFGYFVNKAKTRVYRDTAEPNWNEEFEIELEGSQTLRILCYEKCYNKTKIPKEDGESTDRLMGKGQVQLDPQALQDRDWQRTVIAMNGIEVKLSVKFNSREFSLKRMPSRKQTGVFGVKIAVVTKRERSKVPYIVRQCVEEIERRGMEEVGIYRVSGVATDIQALKAAFDVNNKDVSVMMSEMDVNAIAGTLKLYFRELPEPLFTDEFYPNFAEGIALSDPVAKESCMLNLLLSLPEANLLTFLFLLDHLKRVAEKEAVNKMSLHNLATVFGPTLLRPSEKESKLPANPSQPITMTDSWSLEVMSQVQVLLYFLQLEAIPAPDSKRQSILFSTEV

SEQ ID NO: 16579 - protein, 1130 aa, Homo Sapiens
MLEICLKLVGCKSKKGLSSSSSCYLEEALQRPVASDFEPQGLSEAARWNSKENLLAGPSENDPNLFVALYDFVASGDNTLSITKGEKLRVLGYNHNGEWCEAQTKNGQGWVPSNYITPVNSLEKHSWYHGPVSRNAAEYLLSSGINGSFLVRESESSPGQRSISLRYEGRVYHYRINTASDGKLYVSSESRFNTLAELVHHHSTVADGLITTLHYPAPKRNKPTVYGVSPNYDKWEMERTDITMKHKLGGGQYGEVYEGVWKKYSLTVAVKTLKEDTMEVEEFLKEAAVMKEIKHPNLVQLLGVCTREPPFYIITEFMTYGNLLDYLRECNRQEVNAVVLLYMATQISSAMEYLEKKNFIHRDLAARNCLVGENHLVKVADFGLSRLMTGDTYTAHAGAKFPIKWTAPESLAYNKFSIKSDVWAFGVLLWEIATYGMSPYPGIDLSQVYELLEKDYRMERPEGCPEKVYELMRACWQWNPSDRPSFAEIHQAFETMFQESSISDEVEKELGKQGVRGAVSTLLQAPELPTKTRTSRRAAEHRDTTDVPEMPHSKGQGESDPLDHEPAVSPLLPRKERGPPEGGLNEDERLLPKDKKTNLFSALIKKKKKTAPTPPKRSSSFREMDGQPERRGAGEEEGRDISNGALAFTPLDTADPAKSPKPSNGAGVPNGALRESGGSGFRSPHLWKKSSTLTSSRLATGEEEGGGSSSKRFLRSCSASCVPHGAKDTEWRSVTLPRDLQSTGRQFDSSTFGGHKSEKPALPRKRAGENRSDQVTRGTVTPPPRLVKKNEEAADEVFKDIMESSPGSSPPNLTPKPLRRQVTVAPASGLPHKEEAGKGSALGTPAAAEPVTPTSKAGSGAPGGTSKGPAEESRVRRHKHSSESPGRDKGKLSRLKPAPPPPPAASAGKAGGKPSQSPSQEAAGEAVLGAKTKATSLVDAVNSDAAKPSQPGEGLKKPVLPATPKPQSAKPSGTPISPAPVPSTLPSASSALAGDQPSSTAFIPLISTRVSLRKTRQPPERIASGAITKGVVLDSTEALCLAISRNSEQMASHSAVLEAGKNLYTFCVSYVDSIQQMRNKFAFREAINKLENNLRELQICPATAGSGPAATQDFSKLLSSVKEISDIVQR

SEQ ID NO: 16580 - protein, 655 aa, Homo Sapiens
MSSSNVEVFIPVSQGNTNGFPATASNDLKAFTEGAVLSFHNICYRVKLKSGFLPCRKPVEKEILSNINGIMKPGLNAILGPTGGGKSSLLDVLAARKDPSGLSGDVLINGAPRPANFKCNSGYVVQDDVVMGTLTVRENLQFSAALRLATTMTNHEKNERINRVIQELGLDKVADSKVGTQFIRGVSGGERKRTSIGMELITDPSILFLDEPTTGLDSSTANAVLLLLKRMSKQGRTIIFSIHQPRYSIFKLFDSLTLLASGRLMFHGPAQEALGYFESAGYHCEAYNNPADFFLDIINGDSTAVALNREEDFKATEIIEPSKQDKPLIEKLAEIYVNSSFYKETKAELHQLSGGEKKKKITVFKEISYTTSFCHQLRWVSKRSFKNLLGNPQASIAQIIVTVVLGLVIGAIYFGLKNDSTGIQNRAGVLFFLTTNQCFSSVSAVELFVVEKKLFIHEYISGYYRVSSYFLGKLLSDLLPMRMLPSIIFTCIVYFMLGLKPKADAFFVMMFTLMMVAYSASSMALAIAAGQSVVSVATLLMTICFVFMMIFSGLLVNLTTIASWLSWLQYFSIPRYGFTALQHNEFLGQNFCPGLNATGNNPCNYATCTGEEYLVKQGIDLSPWGLWKNHVALACMIVIFLTIAYLKLLFLKKYS

SEQ ID NO: 16581 - protein, 1863 aa, Homo Sapiens; identical to SEQ ID NO: 14811

SEQ ID NO: 16582 - protein, 3418 aa, Homo Sapiens
MPIGSKERPTFFEIFKTRCNKADLGPISLNWFEELSSEAPPYNSEPAEESEHKNNNYEPNLFKTPQRKPSYNQLASTPIIFKEQGLTLPLYQSPVKELDKFKLDLGRNVPNSRHKSLRTVKTKMDQADDVSCPLLNSCLSESPVVLQCTHVTPQRDKSVVCGSLFHTPKFVKGRQTPKHISESLGAEVDPDMSWSSSLATPPTLSSTVLIVRNEEASETVFPHDTTANVKSYFSNHDESLKKNDRFIASVTDSENTNQREAASHGFGKTSGNSFKVNSCKDHIGKSMPNVLEDEVYETVVDTSEEDSFSLCFSKCRTKNLQKVRTSKTRKKIFHEANADECEKSKNQVKEKYSFVSEVEPNDTDPLDSNVANQKPFESGSDKISKEVVPSLACEWSQLTLSGLNGAQMEKIPLLHISSCDQNISEKDLLDTENKRKKDFLTSENSLPRISSLPKSEKPLNEETVVNKRDEEQHLESHTDCILAVKQAISGTSPVASSFQGIKKSIFRIRESPKETFNASFSGHMTDPNFKKETEASESGLEIHTVCSQKEDSLCPNLIDNGSWPATTTQNSVALKNAGLISTLKKKTNKFIYAIHDETSYKGKKIPKDQKSELINCSAQFEANAFEAPLTFANADSGLLHSSVKRSCSQNDSEEPTLSLTSSFGTILRKCSRNETCSNNTVISQDLDYKEAKCNKEKLQLFITPEADSLSCLQEGQCENDPKSKKVSDIKEEVLAAACHPVQHSKVEYSDTDFQSQKSLLYDHENASTLILTPTSKDVLSNLVMISRGKESYKMSDKLKGNNYESDVELTKNIPMEKNQDVCALNENYKNVELLPPEKYMRVASPSRKVQFNQNTNLRVIQKNQEETTSISKITVNPDSEELFSDNENNFVFQVANERNNLALGNTKELHETDLTCVNEPIFKNSTMVLYGDTGDKQATQVSIKKDLVYVLAEENKNSVKQHIKMTLGQDLKSDISLNIDKIPEKNNDYMNKWAGLLGPISNHSFGGSFRTASNKEIKLSEHNIKKSKMFFKDIEEQYPTSLACVEIVNTLALDNQKKLSKPQSINTVSAHLQSSVVVSDCKNSHITPQMLFSKQDFNSNHNLTPSQKAEITELSTILEESGSQFEFTQFRKPSYILQKSTFEVPENQMTILKTTSEECRDADLHVIMNAPSIGQVDSSKQFEGTVEIKRKFAGLLKNDCNKSASGYLTDENEVGFRGFYSAHGTKLNVSTEALQKAVKLFSDIENISEETSAEVHPISLSSSKCHDSVVSMFKIENHNDKTVSEKNNKCQLILQNNIEMTTGTFVEEITENYKRNTENEDNKYTAASRNSHNLEFDGSDSSKNDTVCIHKDETDLLFTDQHNICLKLSGQFMKEGNTQIKEDLSDLTFLEVAKAQEACHGNTSNKEQLTATKTEQNIKDFETSDTFFQTASGKNISVAKESFNKIVNFFDQKPEELHNFSLNSELHSDIRKNKMDILSYEETDIVKHKILKESVPVGTGNQLVTFQGQPERDEKIKEPTLLGFHTASGKKVKIAKESLDKVKNLFDEKEQGTSEITSFSHQWAKTLKYREACKDLELACETIEITAAPKCKEMQNSLNNDKNLVSIETVVPPKLLSDNLCRQTENLKTSKSIFLKVKVHENVEKETAKSPATCYTNQSPYSVIENSALAFYTSCSRKTSVSQTSLLEAKKWLREGIFDGQPERINTADYVGNYLYENNSNSTIAENDKNHLSEKQDTYLSNSSMSNSYSYHSDEVYNDSGYLSKNKLDSGIEPVLKNVEDQKNTSFSKVISNVKDANAYPQTVNEDICVEELVTSSSPCKNKNAAIKLSISNSNNFEVGPPAFRIASGKIVCVSHETIKKVKDIFTDSFSKVIKENNENKSKICQTKIMAGCYEALDDSEDILHNSLDNDECSTHSHKVFADIQSEEILQHNQNMSGLEKVSKISPCDVSLETSDICKCSIGKLHKSVSSANTCGIFSTASGKSVQVSDASLQNARQVFSEIEDSTKQVFSKVLFKSNEHSDQLTREENTAIRTPEHLISQKGFSYNVVNSSAFSGFSTASGKQVSILESSLHKVKGVLEEFDLIRTEHSLHYSPTSRQNVSKILPRVDKRNPEHCVNSEMEKTCSKEFKLSNNLNVEGGSSENNHSIKVSPYLSQFQQDKQQLVLGTKVSLVENIHVLGKEQASPKNVKMEIGKTETFSDVPVKTNIEVCSTYSKDSENYFETEAVEIAKAFMEDDELTDSKLPSHATHSLFTCPENEEMVLSNSRIGKRRGEPLILVGEPSIKRNLLNEFDRIIENQEKSLKASKSTPDGTIKDRRLFMHHVSLEPITCVPFRTTKERQEIQNPNFTAPGQEFLSKSHLYEHLTLEKSSSNLAVSGHPFYQVSATRNEKMRHLITTGRPTKVFVPPFKTKSHFHRVEQCVRNINLEENRQKQNIDGHGSDDSKNKINDNEIHQFNKNNSNQAAAVTFTKCEEEPLDLITSLQNARDIQDMRIKKKQRQRVFPQPGSLYLAKTSTLPRISLKAAVGGQVPSACSHKQLYTYGVSKHCIKINSKNAESFQFHTEDYFGKESLWTGKGIQLADGGWLIPSNDGKAGKEEFYRALCDTPGVDPKLISRIWVYNHYRWIIWKLAAMECAFPKEFANRCLSPERVLLQLKYRYDTEIDRSRRSAIKKIMERDDTAAKTLVLCVSDIISLSANISETSSNKTSSADTQKVAIIELTDGWYAVKAQLDPPLLAVLKNGRLTVGQKIILHGAELVGSPDACTPLEAPESLMLKISANSTRPARWYTKLGFFPDPRPFPLPLSSLFSDGGNVGCVDVIIQRAYPIQWMEKTSSGLYIFRNEREEEKEAAKYVEAQQKRLEALFTKIQEEFEEHEENTTKPYLPSRALTRQQVRALQDGAELYEAVKNAADPAYLEGYFSEEQLRALNNHRQMLNDKKQAQIQLEIRKAMESAEQKEQGLSRDVTTVWKLRIVSYSKKEKDSVILSIWRPSSDLYSLLTEGKRYRIYHLATSKSKSKSERANIQLAATKKTQYQQLPVSDEILFQIYQPREPLHFSKFLDPDFQPSCSEVDLIGFVVSVVKKTGLAPFVYLSDECYNLLAIKFWIDLNEDIIKPHMLIAASNLQWRPESKSGLLTLFAGDFSVFSASPKEGHFQETFNKMKNTVENIDILCNEAENKLMHILHANDPKWSTPTKDCTSGPYTAQIIPGTGNKLLMSSPNCEIYYQSPLSLCMAKRKSVSTPVSAQMTSKSCKGEKEIDDQKNCKKRRALDFLSRLPLPPPVSPICTFVSPAAQKAFQPPRSCGTKYETPIKKKELNSPQMTPFKKFNEISLLESNSIADEELALINTQALLSGSTGEKQFISVSESTRTAPTSSEDYLRLKRRCTTSLIKEQESSQASTEECEKNKQDTITTKKYI

SEQ ID NO: 16583 - protein, 61 aa, Homo Sapiens
MKRFLFLLLTISLLVMVQIQTGLSGQNDTSQTSSPSASSNISGGIFLFFVANAIIHLFCFS

SEQ ID NO: 16584 - protein, 497 aa, Homo Sapiens [sequence omitted]

SEQ ID NO: 16585 - protein, 260 aa, Homo Sapiens [sequence omitted]

SEQ ID NO: 16586 - protein, 187 aa, Homo Sapiens
MVGSLNCIVAVSQNMGIGKNGDLPWPPLRNEFRYFQRMTTTSSVEGKQNLVIMGKKTWFSIPEKNRPLKGRINLVLSRELKEPPQGAHFLSRSLDDALKLTEQPELANKVDMVWIVGGSSVYKEAMNHPGHLKLFVTRIMQDFESDTFFPEIDLEKYKLLPEYPGVLSDVQEEKGIKYKFEVYEKND

SEQ ID NO: 16587 - protein, 1025 aa, Homo Sapiens
MAPVLSKDSADIESILALNPRTQTHATLCSTSAKKLDKKHWKRNPDKNCFNCEKLENNFDDIKHTTLGERGALREAMRCLKCADAPCQKSCPTNLDIKSFITSIANKNYYGAAKMIFSDNPLGLTCGMVCPTSDLCVGGCNLYATEEGPINIGGLQQFATEVFKAMSIPQIRNPSLPPPEKMSEAYSAKIALFGAGPASISCASFLARLGYSDITIFEKQEYVGGLSTSEIPQFRLPYDVVNFEIELMKDLGVKIICGKSLSVNEMTLSTLKEKGYKAAFIGIGLPEPNKDAIFQGLTQDQGFYTSKDFLPLVAKGSKAGMCACHSPLPSIRGVVIVLGAGDTAFDCATSALRCGARRVFIVFRKGFVNIRAVPEEMELAKEEKCEFLPFLSPRKVIVKGGRIVAMQFVRTEQDETGKWNEDEDQMVHLKADVVISAFGSVLSDPKVKEALSPIKFNRWGLPEVDPETMQTSEAWVFAGGDVVGLANTTVESVNDGKQASWYIHKYVQSQYGASVSAKPELPLFYTPIDLVDISVEMAGLKFINPFGLASATPATSTSMIRRAFEAGWGFALTKTFSLDKDIVTNVSPRIIRGTTSGPMYGPGQSSFLNIELISEKTAAYWCQSVTELKADFPDNIVIASIMCSYNKNDWTELAKKSEDSGADALELNLSCPHGMGERGMGLACGQDPELVRNICRWVRQAVQIPFFAKLTPNVTDIVSIARAAKEGGANGVTATNTVSGLMGLKSDGTPWPAVGIAKRTTYGGVSGTAIRPIALRAVTSIARALPGFPILATGGIDSAESGLQFLHSGASVLQVCSAIQNQDFTVIEDYCTGLKALLYLKSIEELQDWDGQSPATVSHQKGKPVPRIAELMDKKLPSFGPYLEQRKKIIAENKIRLKEQNVAFSPLKRNCFIPKRPIPTIKDVIGKALQYLGTFGELSNVEQVVAMIDEEMCINCGKCYMTCNDSGYQAIQFDPETHLPTITDTCTGCTLCLSVCPIVDCIKMVSRTTPYEPKRGVPLSVNPVC

SEQ ID NO: 16588 - protein, 1210 aa, Homo Sapiens [sequence omitted]

SEQ ID NO: 16589 - protein, 297 aa, Homo Sapiens
MDPGKDKEGVPQPSGPPARKKFVIPLDEDEVPPGVAKPLFRSTQSLPTVDTSAQAAPQTYAEYAISQPLEGAGATCPTGSEPLAGETPNQALKPGAKSNSIIVSPRQRGNPVLKFVRNVPWEFGDVIPDYVLGQSTCALFLSLRYHNLHPDYIHGRLQSLGKNFALRVLLVQVDVKDPQQALKELAKMCILADCTLILAWSPEEAGRYLETYKAYEQKPADLLMEKLEQDFVSRVTECLTTVKSVNKTDSQTLLTTFGSLEQLIAASREDLALCPGLGPQKARRLFDVLHEPFLKVP

SEQ ID NO: 16590 - protein, 595 aa, Homo Sapiens [sequence omitted]

SEQ ID NO: 16591 - protein, 254 aa, Homo Sapiens; identical to SEQ ID NO: 5200

SEQ ID NO: 16592 - protein, 1255 aa, Homo Sapiens [sequence omitted]

SEQ ID NO: 16593 - protein, 1367 aa, Homo Sapiens
MKSGSGGGSPTSLWGLLFLSAALSLWPTSGEICGPGIDIRNDYQQLKRLENCTVIEGYLHILLISKAEDYRSYRFPKLTVITEYLLLFRVAGLESLGDLFPNLTVIRGWKLFYNYALVIFEMTNLKDIGLYNLRNITRGAIRIEKNADLCYLSTVDWSLILDAVSNNYIVGNKPPKECGDLCPGTMEEKPMCEKTTINNEYNYRCWTTNRCQKMCPSTCGKRACTENNECCHPECLGSCSAPDNDTACVACRHYYYAGVCVPACPPNTYRFEGWRCVDRDFCANILSAESSDSEGFVIHDGECMQECPSGFIRNGSQSMYCIPCEGPCPKVCEEEKKTKTIDSVTSAQMLQGCTIFKGNLLINIRRGNNIASELENFMGLIEVVTGYVKIRHSHALVSLSFLKNLRLILGEEQLEGNYSFYVLDNQNLQQLWDWDHRNLTIKAGKMYFAFNPKLCVSEIYRMEEVTGTKGRQSKGDINTRNNGERASCESDVLHFTSTTTSKNRIIITWHRYRPPDYRDLISFTVYYKEAPFKNVTEYDGQDACGSNSWNMVDVDLPPNKDVEPGILLHGLKPWTQYAVYVKAVTLTMVENDHIRGAKSEILYIRTNASVPSIPLDVLSASNSSSQLIVKWNPPSLPNGNLSYYIVRWQRQPQDGYLYRHNYCSKDKIPIRKYADGTIDIEEVTENPKTEVCGGEKGPCCACPKTEAEKQAEKEEAEYRKVFENFLHNSIFVPRPERKRRDVMQVANTTMSSRSRNTTAADTYNITDPEELETEYPFFESRVDNKERTVISNLRPFTLYRIDIHSCNHEAEKLGCSASNFVFARTMPAEGADDIPGPVTWEPRPENSIFLKWPEPENPNGLILMYEIKYGSQVEDQRECVSRQEYRKYGGAKLNRLNPGNYTARIQATSLSGNGSWTDPVFFYVQAKTGYENFIHLIIALPVAVLLIVGGLVIMLYVFHRKRNNSRLGNGVLYASVNPEYFSAADVYVPDEWEVAREKITMSRELGQGSFGMVYEGVAKGVVKDEPETRVAIKTVNEAASMRERIEFLNEASVMKEFNCHHVVRLLGVVSQGQPTLVIMELMTRGDLKSYLRSLRPEMENNPVLAPPSLSKMIQMAGEIADGMAYLNANKFVHRDLAARNCMVAEDFTVKIGDFGMTRDIYETDYYRKGGKGLLPVRWMSPESLKDGVFTTYSDVWSFGVVLWEIATLAEQPYQGLSNEQVLRFVMEGGLLDKPDNCPDMLFELMRMCWQYNPKMRPSFLEIISSIKEEMEPGFREVSFYYSEENKLPEPEELDLEPENMESVPLDPSASSSSLPLPDRHSGHKAENGPGPGVLVLRASFDERQPYAHMNGGRKNERALPLPQSSTC

SEQ ID NO: 16594 - protein, 189 aa, Homo Sapiens [sequence omitted]

SEQ ID NO: 16595 - protein, 1280 aa, Homo Sapiens
MDLEGDRNGGAKKKNFFKLNNKSEKDKKEKKPTVSVFSMFRYSNWLDKLYMVVGTLAAIIHGAGLPLMMLVFGEMTDIFANAGNLEDLMSNITNRSDINDTGFFMNLEEDMTRYAYYYSGIGAGVLVAAYIQVSFWCLAAGRQIHKIRKQFFHAIMRQEIGWFDVHDVGELNTRLTDDVSKINEGIGDKIGMFFQSMATFFTGFIVGFTRGWKLTLVILAISPVLGLSAAVWAKILSSFTDKELLAYAKAGAVAEEVLAAIRTVIAFGGQKKELERYNKNLEEAKRIGIKKAITANISIGAAFLLIYASYALAFWYGTTLVLSGEYSIGQVLTVFFSVLIGAFSVGQASPSIEAFANARGAAYEIFKIIDNKPSIDSYSKSGHKPDNIKGNLEFRNVHFSYPSRKEVKILKGLNLKVQSGQTVALVGNSGCGKSTTVQLMQRLYDPTEGMVSVDGQDIRTINVRFLREIIGVVSQEPVLFATTIAENIRYGRENVTMDEIEKAVKEANAYDFIMKLPHKFDTLVGERGAQLSGGQKQRIAIARALVRNPKILLLDEATSALDTESEAVVQVALDKARKGRTTIVIAHRLSTVRNADVIAGFDDGVIVEKGNHDELMKEKGIYFKLVTMQTAGNEVELENAADESKSEIDALEMSSNDSRSSLIRKRSTRRSVRGSQAQDRKLSTKEALDESIPPVSFWRIMKLNLTEWPYFVVGVFCAIINGGLQPAFAIIFSKIIGVFTRIDDPETKRQNSNLFSLLFLALGIISFITFFLQGFTFGKAGEILTKRLRYMVFRSMLRQDVSWFDDPKNTTGALTTRLANDAAQVKGAIGSRLAVITQNIANLGTGIIISFIYGWQLTLLLLAIVPIIAIAGVVEMKMLSGQALKDKKELEGSGKIATEAIENFRTVVSLTQEQKFEHMYAQSLQVPYRNSLRKAHIFGITFSFTQAMMYFSYAGCFRFGAYLVAHKLMSFEDVLLVFSAVVFGAMAVGQVSSFAPDYAKAKISAAHIIMIIEKTPLIDSYSTEGLMPNTLEGNVTFGEVVFNYPTRPDIPVLQGLSLEVKKGQTLALVGSSGCGKSTVVQLLERFYDPLAGKVLLDGKEIKRLNVQWLRAHLGIVSQEPILFDCSIAENIAYGDNSRVVSQEEIVRAAKEANIHAFIESLPNKYSTKVGDKGTQLSGGQKQRIAIARALVRQPHILLLDEATSALDTESEKVVQEALDKAREGRTCIVIAHRLSTIQNADLIVVFQNGRVKEHGTHQQLLAQKGIYFSMVSVQAGTKRQ

SEQ ID NO: 16596 - protein, 207 aa, Homo Sapiens
MDKDCEMKRTTLDSPLGKLELSGCEQGLHEIKLLGKGTSAADAVEVPAPAAVLGGPEPLMQCTAWLNAYFHQPEAIEEFPVPALHHPVFQQESFTRQVLWKLLKVVKFGEVISYQQLAALAGNPKAARAVGGAMRGNPVPILIPCHRVVCSSGAVGNYSGGLAVKEWLLAHEGHRLGKPGLGGSSGLAGAWLKGAGATSGSPPAGRN

SEQ ID NO: 16597 - protein, 1531 aa, Homo Sapiens
MALRGFCSADGSDPLWDWNVTWNTSNPDFTKCFQNTVLVWVPCFYLWACFPFYFLYLSRHDRGYIQMTPLNKTKTALGFLLWIVCWADLFYSFWERSRGIFLAPVFLVSPTLLGITMLLATFLIQLERRKGVQSSGIMLTFWLVALVCALAILRSKIMTALKEDAQVDLFRDITFYVYFSLLLIQLVLSCFSDRSPLFSETIHDPNPCPESSASFLSRITFWWITGLIVRGYRQPLEGSDLWSLNKEDTSEQVVPVLVKNWKKECAKTRKQPVKVVYSSKDPAQPKESSKVDANEEVEALIVKSPQKEWNPSLFKVLYKTFGPYFLMSFFFKAIHDLMMFSGPQILKLLIKFVNDTKAPDWQGYFYTVLLFVTACLQTLVLHQYFHICFVSGMRIKTAVIGAVYRKALVITNSARKSSTVGEIVNLMSVDAQRFMDLATYINMIWSAPLQVILALYLLWLNLGPSVLAGVAVMVLMVPVNAVMAMKTKTYQVAHMKSKDNRIKLMNEILNGIKVLKLYAWELAFKDKVLAIRQEELKVLKKSAYLSAVGTFTWVCTPFLVALCTFAVYVTIDENNILDAQTAFVSLALFNILRFPLNILPMVISSIVQASVSLKRLRIFLSHEELEPDSIERRPVKDGGGTNSITVRNATFTWARSDPPTLNGITFSIPEGALVAVVGQVGCGKSSLLSALLAEMDKVEGHVAIKGSVAYVPQQAWIQNDSLRENILFGCQLEEPYYRSVIQACALLPDLEILPSGDRTEIGEKGVNLSGGQKQRVSLARAVYSNADIYLFDDPLSAVDAHVGKHIFENVIGPKGMLKNKTRILVTHSMSYLPQVDVIIVMSGGKISEMGSYQELLARDGAFAEFLRTYASTEQEQDAEENGVTGVSGPGKEAKQMENGMLVTDSAGKQLQRQLSSSSSYSGDISRHHNSTAELQKAEAKKEETWKLMEADKAQTGQVKLSVYWDYMKAIGLFISFLSIFLFMCNHVSALASNYWLSLWTDDPIVNGTQEHTKVRLSVYGALGISQGIAVFGYSMAVSIGGILASRCLHVDLLHSILRSPMSFFERTPSGNLVNRFSKELDTVDSMIPEVIKMFMGSLFNVIGACIVILLATPIAAIIIPPLGLIYFFVQRFYVASSRQLKRLESVSRSPVYSHFNETLLGVSVIRAFEEQERFIHQSDLKVDENQKAYYPSIVANRWLAVRLECVGNCIVLFAALFAVISRHSLSAGLVGLSVSYSLQVTTYLNWLVRMSSEMETNIVAVERLKEYSETEKEAPWQIQETAPPSSWPQVGRVEFRNYCLRYREDLDFVLRHINVTINGGEKVGIVGRTGAGKSSLTLGLFRINESAEGEIIIDGINIAKIGLHDLRFKITIIPQDPVLFSGSLRMNLDPFSQYSDEEVWTSLELAHLKDFVSALPDKLDHECAEGGENLSVGQRQLVCLARALLRKTKILVLDEATAAVDLETDDLIQSTIRTQFEDCTVLTIAHRLNTIMDYTRVIVLDKGEIQEYGAPSDLLQQRGLFYSMAKDAGLV

SEQ ID NO: 16598 - protein, 933 aa, Homo Sapiens; identical to SEQ ID NO: 15481

SEQ ID NO: 16599 - protein, 173 aa, Homo Sapiens
MQSELCFADIHDSDGSSSSSHQSLKSTAKWAASLENLLEDPEGVKRFREFLKKEFSEENVLFWLACEDFKKMQDKTQMQEKAKEIYMTFLSSKASSQVNVEGQSRLNEKILEEPHPLMFQKLQDQIFNLMKYDSYSRFLKSDLFLKHKRTEEEEEDLPDAQTAAKRASRIYNT

SEQ ID NO: 16600 - protein, 225 aa, Homo Sapiens
MVTHSKFPAAGMSRPLDTSLRLKTFSSKSEYQLVVNAVRKLQESGFYWSAVTGGEANLLLSAEPAGTFLIRDSSDQRHFFTLSVKTQSGTKNLRIQCEGGSFSLQSDPRSTQPVPRFDCVLKLVHHYMPPPGAPSFPSPPTEPSSEVPEQPSAQPLPGSPPRRAYYIYSGGEKIPLVLSRPLSSNVATLQHLCRKTVNGHLDSYEKVTQLPGPIREFLDQYDAPL

SEQ ID NO: 16601 - protein, 313 aa, Homo Sapiens
MPVAGSELPRRPLPPAAQERDAEPRPPHGELQYLGQIQHILRCGVRKDDRTGTGTLSVFGMQARYSLRDEFPLLTTKRVFWKGVLEELLWFIKGSTNAKELSSKGVKIWDANGSRDFLDSLGFSTREEGDLGPVYGFQWRHFGAEYRDMESDYSGQGVDQLQRVIDTIKTNPDDRRIIMCAWNPRDLPLMALPPCHALCQFYVVNSELSCQLYQRSGDMGLGVPFNIASYALLTYMIAHITGLKPGDFIHTLGDAHIYLNHIEPLKIQLQREPRPFPKLRILRKVEKIDDFKAEDFQIEGYNPHPTIKMEMAV

SEQ ID NO: 16602 - protein, 533 aa, Homo Sapiens
MAVESQGGRPLVLGLLLCVLGPVVSHAGKILLIPVDGSHWLSMLGAIQQLQQRGHEIVVLAPDASLYIRDGAFYTLKTYPVPFQREDVKESFVSLGHNVFENDSFLQRVIKTYKKIKKDSAMLLSGCSHLLHNKELMASLAESSFDVMLTDPFLPCSPIVAQYLSLPTVFFLHALPCSLEFEATQCPNPFSYVPRPLSSHSDHMTFLQRVKNMLIAFSQNFLCDVVYSPYATLASEFLQREVTVQDLLSSASVWLFRSDFVKDYPRPIMPNMVFVGGINCLHQNPLSQEFEAYINASGEHGIVVFSLGSMVSEIPEKKAMAIADALGKIPQTVLWRYTGTRPSNLANNTILVKWLPQNDLLGHPMTRAFITHAGSHGVYESICNGVPMVMMPLFGDQMDNAKRMETKGAGVTLNVLEMTSEDLENALKAVINDKSYKENIMRLSSLHKDRPVEPLDLAVFWVEFVMRHKGAPHLRPAAHDLTWYQYHSLDVIGFLLAVVLTVAFITFKCCAYGYRKCLGKKGRVKKAHKSKTH

SEQ ID NO: 16603 - protein, 2002 aa, Homo Sapiens; identical to SEQ ID NO: 15749

SEQ ID NO: 16604 - protein, 912 aa, Homo Sapiens; identical to SEQ ID NO: 14891

SEQ ID NO: 16605 - protein, 193 aa, Homo Sapiens
MAAIRKKLVIVGDGACGKTCLLIVFSKDQFPEVYVPTVFENYVADIEVDGKQVELALWDTAGQEDYDRLRPLSYPDTDVILMCFSIDSPDSLENIPEKWTPEVKHFCPNVPIILVGNKKDLRNDEHTRRELAKMKQEPVKPEEGRDMANRIGAFGYMECSAKTKDGVREVFEMATRAALQARRGKKKSGCLVL

SEQ ID NO: 16606 - protein, 845 aa, Homo Sapiens
MELWRQCTHWLIQCRVLPPSHRVTWDGAQVCELAQALRDGVLLCQLLNNLLPHAINLREVNLRPQMSQFLCLKNIRTFLSTCCEKFGLKRSELFEAFDLFDVQDFGKVIYTLSALSWTPIAQNRGIMPFPTEEESVGDEDIYSGLSDQIDDTVEEDEDLYDCVENEEAEGDEIYEDLMRSEPVSMPPKMTEYDKRCCCLREIQQTEEKYTDTLGSIQQHFLKPLQRFLKPQDIEIIFINIEDLLRVHTHFLKEMKEALGTPGAANLYQVFIKYKERFLVYGRYCSQVESASKHLDRVAAAREDVQMKLEECSQRANNGRFTLRDLLMVPMQRVLKYHLLLQELVKHTQEAMEKENLRLALDAMRDLAQCVNEVKRDNETLRQITNFQLSIENLDQSLAHYGRPKIDGELKITSVERRSKMDRYAFLLDKALLICKRRGDSYDLKDFVNLHSFQVRDDSSGDRDNKKWSHMFLLIEDQGAQGYELFFKTRELKKKWMEQFEMAISNIYPENATANGHDFQMFSFEETTSCKACQMLLRGTFYQGYRCHRCRASAHKECLGRVPPCGRHGQDFPGTMKKDKLHRRAQDKKRNELGLPKMEVFQEYYGLPPPPGAIGPFLRLNPGDIVELTKAEAEQNWWEGRNTSTNEIGWFPCNRVKPYVHGPPQDLSVHLWYAGPMERAGAESILANRSDGTFLVRQRVKDAAEFAISIKYNVEVKHIKIMTAEGLYRITEKKAFRGLTELVEFYQQNSLKDCFKSLDTTLQFPFKEPEKRTISRPAVGSTKYFGTAKARYDFCARDRSELSLKEGDIIKILNKKGQQGWWRGEIYGRVGWFPANYVEEDYSEYC

SEQ ID NO: 16607 - protein, 158 aa, Homo Sapiens
MSSAIERKSLDPSEEPVDEVLQIPPSLLTCGGCQQNIGDRYFLKAIDQYWHEDCLSCDLCGCRLGEVGRRLYYKLGRKLCRRDYLRLFGQDGLCASCDKRIRAYEMTMRVKDKVYHLECFKCAACQKHFCVGDRYLLINSDIVCEQDIYEWTKINGMI

SEQ ID NO: 16608 - protein, 331 aa, Homo Sapiens; identical to SEQ ID NO: 15705

SEQ ID NO: 16609 - protein, 211 aa, Homo Sapiens
MVAHNQVAADNAVSTAAEPRRRPEPSSSSSSSPAAPARPRPCPAVPAPAPGDTHFRTFRSHADYRRITRASALLDACGFYWGPLSVHGAHERLRAEPVGTFLVRDSRQRNCFFALSVKMASGPTSIRVHFQAGRFHLDGSRESFDCLFELLEHYVAAPRRMLGAPLRQRRVRPLQELCRQRIVATVGRENLARIPLNPVLRDYLSSFPFQI

SEQ ID NO: 16610 - protein, 283 aa, Homo Sapiens; identical to SEQ ID NO: 13574

SEQ ID NO: 16611 - protein, 337 aa, Homo Sapiens
MNSTCIEEQHDLDHYLFPIVYIFVIIVSIPANIGSLCVSFLQAKKESELGIYLFSLSLSDLLYALTLPLWIDYTWNKDNWTFSPALCKGSAFLMYMNFYSSTAFLTCIAVDRYLAVVYPLKFFFLRTRRFALMVSLSIWILETIFNAVMLWEDETVVEYCDAEKSNFTLCYDKYPLEKWQINLNLFRTCTGYAIPLVTILICNRKVYQAVRHNKATENKEKKRIIKLLVSITVTFVLCFTPFHVMLLIRCILEHAVNFEDHSNSGKRTYTMYRITVALTSLNCVADPILYCFVTETGRYDMWNILKFCTGRCNTSQRQRKRILSVSTKDTMELEVLE

SEQ ID NO: 16612 - protein, 1755 aa, Homo Sapiens
MLSATPLYGNVHSWMNSERVRMCGASEDRKILVNDGDASKARLELREENPLNHNVVDASTAHRIDGLAALSMDRTGLIREGLRVPGNIVYSSLCGLGSEKGREAATSTLGGLGFSSERNPEMQFKPNTPETVEASAVSGKPPNGFSAIYKTPPGIQKSAVATAEALGLDRPASDKQSPLNINGASYLRLPWVNPYMEGATPAIYPFLDSPNKYSLNMYKALLPQQSYSLAQPLYSPVCTNGERFLYLPPPHYVGPHIPSSLASPMRLSTPSASPAIPPLVHCADKSLPWKMGVSPGNPVDSHAYPHIQNSKQPRVPSAKAVTSGLPGDTALLLPPSPRPSPRVHLPTQPAADTYSEFHKHYARISTSPSVALSKPYMTVSSEFPAARLSNGKYPKAPEGGEGAQPVPGHARKTAVQDRKDGSSPPLLEKQTVTKDVTDKPLDLSSKVVDVDASKADHMKKMAPTVLVHSRAGSGLVLSGSEIPKETLSPPGNGCAIYRSEIISTAPSSWVVPGPSPNEENNGKSMSLKNKALDWAIPQQRSSSCPRMGGTDAVITNVSGSVSSAGRPASASPAPNANADGTKTSRSSVETTPSVIQHVGQPPATPAKHSSSTSSKGAKASNPEPSFKANENGLPPSSIFLSPNEAFRSPPIPYPRSYLPYPAPEGIAVSPLSLHGKGPVYPHPVLLPNGSLFPGHLAPKPGLPYGLPTGRPEFVTYQDALGLGMVHPMLIPHTPIEITKEEKPERRSRSHERARYEDPTLRNRFSEILETSSTKLHPDVPTDKNLKPNPNWNQGKTVVKSDKLVYVDLLREEPDAKTDTNVSKPSFAAESVGQSAEPPKPSVEPALQQHRDFIALREELGRISDFHETYTFKQPVFTVSKDSVLAGTNKENLGLPVSTPFLEPPLGSDGPAVTFGKTQEDPKPFCVGSAPPSVDVTPTYTKDGADEAESNDGKVLKPKPSKLAKRIANSAGYVGDRFKCVTTELYADSSQLSREQRALQMEGLQEDSILCLPAAYCERAMMRFSELEMKEREGGHPATKDSEMCKFSPADWERLKGNQDKKPKSVTLEEAIAEQNESERCEYSVGNKHRDPFEAPEDKDLPVEKYFVERQPVSEPPADQVASDMPHSPTLRVDRKRKVSGDSSHTETTAEEVPEDPLLKAKRRRVSKDDWPEREMTNSSSNHLEDPHYSELTNLKVCIELTGLHPKKQRHLLHLRERWEQQVSAADGKPGRQSRKEVTQATQPEAIPQGTNITEEKPGRKRAEAKGNRSWSEESLKPSDNEQGLPVFSGSPPMKSLSSTSAGGKKQAQPSCAPASRPPAKQQKIKENQKTDVLCADEEEDCQAASLLQKYTDNSEKPSGKRLCKTKHLIPQESRRGLPLTGEYYVENADGKVTVRRFRKRPEPSSDYDLSPAKQEPKPFDRLQQLLPASQSTQLPCSSSPQETTQSRPMPPEARRLIVNKNAGETLLQRAARLGYEEVVLYCLENKICDVNHRDNAGYCALHEACARGWLNIVRHLLEYGADVNCSAQDGTRPLHDAVENDHLEIVRLLLSYGADPTLATYSGRTIMKMTHSELMEKFLTDYLNDLQGRNDDDASGTWDFYGSSVCEPDDESGYDVLANPPGPEDQDDDDDAYSDVFEFEFSETPLLPCYNIQVSVAQGPRNWLLLSDVLKKLKMSSRIFRCNFPNVEIVTIAEAEFYRQVSASLLFSCSKDLEAFNPESKELLDLVEFTNEIQTLLGSSVEWLHPSDLASDNYW

SEQ ID NO: 16613 - protein, 289 aa, Homo Sapiens; identical to SEQ ID NO: 14650

SEQ ID NO: 16614 - protein, 664 aa, Homo Sapiens; identical to SEQ ID NO: 12683

SEQ ID NO: 16615 - protein, 303 aa, Homo Sapiens; identical to SEQ ID NO: 15310

SEQ ID NO: 16616 - protein, 254 aa, Homo Sapiens; identical to SEQ ID NO: 14707

SEQ ID NO: 16617 - protein, 417 aa, Homo Sapiens; identical to SEQ ID NO: 13599

SEQ ID NO: 16618 - protein, 250 aa, Homo Sapiens [sequence omitted]

SEQ ID NO: 16619 - protein, 168 aa, Homo Sapiens
MFQIPEFEPSEQEDSSSAERGLGPSPAGDGPSGSGKHHRQAPGLLWDASHQQEQPTSSSHHGGAGAVEIRSRHSSYPAGTEDDEGMGEEPSPFRGRSRSAPPNLWAAQRYGRELRRMSDEFVDSFKKGLPRPKSAGTATQMRQSSSWTRVFQSWWDRNLGRGSSAPSQ

SEQ ID NO: 16620 - protein, 184 aa, Homo Sapiens
MLQMAGQCSQNEYFDSLLHACIPCQLRCSSNTPPLTCQRYCNASVTNSVKGTNAILWTCLGLSLIISLAVFVLMFLLRKINSEPLKDEFKNTGSGLLGMANIDLEKSRTGDEIILPRGLEYTVEECTCEDCIKSKPKVDSDHCFPLPAMEEGATILVTTKTNDYCKSLPAALSATEIEKSISAR

SEQ ID NO: 16621 - protein, 96 aa, Homo Sapiens; identical to SEQ ID NO: 2120

SEQ ID NO: 16622 - protein, 97 aa, Homo Sapiens; identical to SEQ ID NO: 2121

SEQ ID NO: 16623 - protein, 98 aa, Homo Sapiens; identical to SEQ ID NO: 2122

SEQ ID NO: 16624 - protein, 93 aa, Homo Sapiens; identical to SEQ ID NO: 2126

SEQ ID NO: 16625 - protein, 113 aa, Homo Sapiens
MKVSVAALSCLMLVAVLGSQAQFINDAETELMMSKLPLENPVVLNSFHFAADCCTSYISQSIPCSLMKSYFETSSECSKPGVIFLTKKGRQVCAKPSGPGVQDCMKKLKPYSI

SEQ ID NO: 16626 - protein, 120 aa, Homo Sapiens; identical to SEQ ID NO: 2130

SEQ ID NO: 16627 - protein, 94 aa, Homo Sapiens; identical to SEQ ID NO: 2133

SEQ ID NO: 16628 - protein, 89 aa, Homo Sapiens; identical to SEQ ID NO: 2135

SEQ ID NO: 16629 - protein, 98 aa, Homo Sapiens; identical to SEQ ID NO: 2137

SEQ ID NO: 16630 - protein, 99 aa, Homo Sapiens; identical to SEQ ID NO: 2138

SEQ ID NO: 16631 - protein, 96 aa, Homo Sapiens; identical to SEQ ID NO: 2141

SEQ ID NO: 16632 - protein, 134 aa, Homo Sapiens; identical to SEQ ID NO: 2144

SEQ ID NO: 16633 - protein, 93 aa, Homo Sapiens; identical to SEQ ID NO: 2145

SEQ ID NO: 16634 - protein, 120 aa, Homo Sapiens
MKVSVAALSCLMLVTALGSQARVTKDAETEFMMSKLPLENPVLLDRFHATSADCCISYTPRSIPCSLLESYFETNSECSKPGVIFLTKKGRRFCANPSDKQVQVCVRMLKLDTRIKTRKN

SEQ ID NO: 16635 - protein, 119 aa, Homo Sapiens; identical to SEQ ID NO: 2149

SEQ ID NO: 16636 - protein, 150 aa, Homo Sapiens; identical to SEQ ID NO: 2152

SEQ ID NO: 16637 - protein, 94 aa, Homo Sapiens; identical to SEQ ID NO: 2155

SEQ ID NO: 16638 - protein, 112 aa, Homo Sapiens; identical to SEQ ID NO: 2157

SEQ ID NO: 16639 - protein, 127 aa, Homo Sapiens; identical to SEQ ID NO: 2159

SEQ ID NO: 16640 - protein, 92 aa, Homo Sapiens; identical to SEQ ID NO: 2161

SEQ ID NO: 16641 - protein, 92 aa, Homo Sapiens; identical to SEQ ID NO: 2163

SEQ ID NO: 16642 - protein, 91 aa, Homo Sapiens; identical to SEQ ID NO: 2175

SEQ ID NO: 16643 - protein, 99 aa, Homo Sapiens; identical to SEQ ID NO: 2180

SEQ ID NO: 16644 - protein, 99 aa, Homo Sapiens; identical to SEQ ID NO: 2181

SEQ ID NO: 16645 - protein, 355 aa, Homo Sapiens
METPNTTEDYDTTTEFDYGDATPCQKVNERAFGAQLLPPLYSLVFVIGLVGNILVVLVLVQYKRLKNMTSIYLLNLAISDLLFLFTLPFWIDYKLKDDWVFGDAMCKILSGFYYTGLYSEIFFIILLTIDRYLAIVHAVFALRARTVTFGVITSIIIWALAILASMPGLYFSKTQWEFTHHTCSLHFPHESLREWKLFQALKLNLFGLVLPLLVMIICYTGIIKILLRRPNEKKSKAVRLIFVIMIIFFLFWTPYNLTILISVFQDFLFTHECEQSRHLDLAVQVTEVIAYTHCCVNPVIYAFVGERFRKYLRQLFHRRVAVHLVKWLPFLSVDRLERVSSTSPSTGEHELSAGF

SEQ ID NO: 16646 - protein, 362 aa, Homo Sapiens
MGTEATEQVSWGHYSGDEEDAYSAEPLPELCYKADVQAFSRAFQPSVSLTVAALGLAGNGLVLATHLAARRAARSPTSAHLLQLALADLLLALTLPFAAAGALQGWSLGSATCRTISGLYSASFHAGFLFLACISADRYVAIARALPAGPRPSTPGRAHLVSVIVWLLSLLLALPALLFSQDGQREGQRRCRLIFPEGLTQTVKGASAVAQVALGFALPLGVMVACYALLGRTLLAARGPERRRALRVVVALVAAFVVLQLPYSLALLLDTADLLAARERSCPASKRKDVALLVTSGLALARCGLNPVLYAFLGLRFRQDLRRLLRGGSCPSGPQPRRGCPRRPRLSSCSAPTETHSLSWDN

SEQ ID NO: 16647 - protein, 350 aa, Homo Sapiens
MALEQNQSTDYYYEENEMNGTYDYSQYELICIKEDVREFAKVFLPVFLTIVFVIGLAGNSMVVAIYAYYKKQRTKTDVYILNLAVADLLLLFTLPFWAVNAVHGWVLGKIMCKITSALYTLNFVSGMQFLACISIDRYVAVTKVPSQSGVGKPCWIICFCVWMAAILLSIPQLVFYTVNDNARCIPIFPRYLGTSMKALIQMLEICIGFVVPFLIMGVCYFITARTLMKMPNIKISRPLKVLLTVVIVFIVTQLPYNIVKFCRAIDIIYSLITSCNMSKRMDIAIQVTESIALFHSCLNPILYVFMGASFKNYVMKVAKKYGSWRRQRQSVEEFPFDSEGPTEPTSTFSI

SEQ ID NO: 16648 - protein, 374 aa, Homo Sapiens
MLSTSRSRFIRNTNESGEEVTTFFDYDYGAPCHKFDVKQIGAQLLPPLYSLVFIFGFVGNMLVVLILINCKKLKCLTDIYLLNLAISDLLFLITLPLWAHSAANEWVFGNAMCKLFTGLYHIGYFGGIFFIILLTIDRYLAIVHAVFALKARTVTFGVVTSVITWLVAVFASVPGIIFTKCQKEDSVYVCGPYFPRGWNNFHTIMRNILGLVLPLLIMVICYSGILKTLLRCRNEKKRHRAVRVIFTIMIVYFLFWTPYNIVILLNTFQEFFGLSNCESTSQLDQATQVTETLGMTHCCINPIIYAFVGEKFRSLFHIALGCRIAPLQKPVCGGPGVRPGKNVKVTTQGLLDGRGKGKSIGRAPEASLQDKEGA

SEQ ID NO: 16649 - protein, 355 aa, Homo Sapiens
MTTSLDTVETFGTTSYYDDVGLLCEKADTRALMAQFVPPLYSLVFTVGLLGNVVVVMILIKYRRLRIMTNIYLLNLAISDLLFLVTLPFWIHYVRGHNWVFGHGMCKLLSGFYHTGLYSEIFFIILLTIDRYLAIVHAVFALRARTVTFGVITSIVTWGLAVLAALPEFIFYETEELFEETLCSALYPEDTVYSWRHFHTLRMTIFCLVLPLLVMAICYTGIIKTLLRCPSKKKYKAIRLIFVIMAVFFIFWTPYNVAILLSSYQSILFGNDCERSKHLDLVMLVTEVIAYSHCCMNPVIYAFVGERFRKYLRHFFHRHLLMHLGRYIPFLPSEKLERTSSVSPSTAEPELSIVF

SEQ ID NO: 16650 - protein, 360 aa, Homo Sapiens
MNPTDIADTTLDESIYSNYYLYESIPKPCTKEGIKAFGELFLPPLYSLVFVFGLLGNSVVVLVLFKYKRLRSMTDVYLLNLAISDLLFVFSLPFWGYYAADQWVFGLGLCKMISWMYLVGFYSGIFFVMLMSIDRYLAIVHAVFSLRARTLTYGVITSLATWSVAVFASLPGFLFSTCYTERNHTYCKTKYSLNSTTWKVLSSLEINILGLVIPLGIMLFCYSMIIRTLQHCKNEKKNKAVKMIFAVVVLFLGFWTPYNIVLFLETLVELEVLQDCTFERYLDYAIQATETLAFVHCCLNPIIYFFLGEKFRKYILQLFKTCRGLFVLCQYCGLLQIYSADTPSSSYTQSTMDHDLHDAL

SEQ ID NO: 16651 - protein, 352 aa, Homo Sapiens [sequence omitted]

SEQ ID NO: 16652 - protein, 374 aa, Homo Sapiens
MSGESMNFSDVFDSSEDYFVSVNTSYYSVDSEMLLCSLQEVRQFSRLFVPIAYSLICVFGLLGNILVVITFAFYKKARSMTDVYLLNMAIADILFVLTLPFWAVSHATGAWVFSNATCKLLKGIYAINFNCGMLLLTCISMDRYIAIVQATKSFRLRSRTLPRSKIICLVVWGLSVIISSSTFVFNQKYNTQGSDVCEPKYQTVSEPIRWKLLMLGLELLFGFFIPLMFMIFCYTFIVKTLVQAQNSKRHKAIRVIIAVVLVFLACQIPHNMVLLVTAANLGKMNRSCQSEKLIGYTKTVTEVLAFLHCCLNPVLYAFIGQKFRNYFLKILKDLWCVRRKYKSSGFSCAGRYSENISRQTSETADNDNASSFTM

SEQ ID NO: 16653 - protein, 378 aa, Homo Sapiens
MDLGKPMKSVLVVALLVIFQVCLCQDEVTDDYIGDNTTVDYTLFESLCSKKDVRNFKAWFLPIMYSIICFVGLLGNGLVVLTYIYFKRLKTMTDTYLLNLAVADILFLLTLPFWAYSAAKSWVFGVHFCKLIFAIYKMSFFSGMLLLLCISIDRYVAIVQAVSAHRHRARVLLISKLSCVGIWILATVLSIPELLYSDLQRSSSEQAMRCSLITEHVEAFITIQVAQMVIGFLVPLLAMSFCYLVIIRTLLQARNFERNKAIKVIIAVVVVFIVFQLPYNGVVLAQTVANFNITSSTCELSKQLNIAYDVTYSLACVRCCVNPFLYAFIGVKFRNDLFKLFKDLGCLSQEQLRQWSSCRHIRRSSMSVEAETTTTFSP

SEQ ID NO: 16654 - protein, 355 aa, Homo Sapiens
MDYTLDLSVTTVTDYYYPDIFSSPCDAELIQTNGKLLLAVFYCLLFVFSLLGNSLVILVLVVCKKLRSITDVYLLNLALSDLLFVFSFPFQTYYLLDQWVFGTVMCKVVSGFYYIGFYSSMFFITLMSVDRYLAVVHAVYALKVRTIRMGTTLCLAVWLTAIMATIPLLVFYQVASEDGVLQCYSFYNQQTLKWKIFTNFKMNILGLLIPFTIFMFCYIKILHQLKRCQNHNKTKAIRLVLIVVIASLLFWVPFNVVLFLTSLHSMHILDGCSISQQLTYATHVTEIISFTHCCVNPVIYAFVGEKFKKHLSEIFQKSCSQIFNYLGRQMPRESCEKSSSCQQHSSRSSSVDYIL

SEQ ID NO: 16655 - protein, 369 aa, Homo Sapiens
MTPTDFTSPIPNMADDYGSESTSSMEDYVNFNFTDFYCEKNNVRQFASHFLPPLYWLVFIVGALGNSLVILVYWYCTRVKTMTDMFLLNLAIADLLFLVTLPFWAIAAADQWKFQTFMCKVVNSMYKMNFYSCVLLIMCISVDRYIAIAQAMRAHTWREKRLLYSKMVCFTIWVLAAALCIPEILYSQIKEESGIAICTMVYPSDESTKLKSAVLTLKVILGFFLPFVVMACCYTIIIHTLIQAKKSSKHKALKVTITVLTVFVLSQFPYNCILLVQTIDAYAMFISNCAVSTNIDICFQVTQTIAFFHSCLNPVLYVFVGERFRRDLVKTLKNLGCISQAQWVSFTRREGSLKLSSMLLETTSGALSL

SEQ ID NO: 16656 - protein, 836 aa, Homo Sapiens
MARLGNCSLTWAALIILLLPGSLEECGHISVSAPIVHLGDPITASCIIKQNCSHLDPEPQILWRLGAELQPGGRQQRLSDGTQESIITLPHLNHTQAFLSCCLNWGNSLQILDQVELRAGYPPAIPHNLSCLMNLTTSSLICQWEPGPETHLPTSFTLKSFKSRGNCQTQGDSILDCVPKDGQSHCCIPRKHLLLYQNMGIWVQAENALGTSMSPQLCLDPMDVVKLEPPMLRTMDPSPEAAPPQAGCLQLCWEPWQPGLHINQKCELRHKPQRGEASWALVGPLPLEALQYELCGLLPATAYTLQIRCIRWPLPGHWSDWSPSLELRTTERAPTVRLDTWWRQRQLDPRTVQLFWKPVPLEEDSGRIQGYVVSWRPSGQAGAILPLCNTTELSCTFHLPSEAQEVALVAYNSAGTSRPTPVVFSESRGPALTRLHAMARDPHSLWVGWEPPNPWPQGYVIEWGLGPPSASNSNKTWRMEQNGRATGFLLKENIRPFQLYEIIVTPLYQDTMGPSQHVYAYSQEMAPSHAPELHLKHIGKTWAQLEWVPEPPELGKSPLTHYTIFWTNAQNQSFSAILNASSRGFVLHGLEPASLYHIHLMAASQAGATNSTVLTLMTLTPEGSELHIILGLFGLLLLLTCLCGTAWLCCSPNRKNPLWPSVPDPAHSSLGSWVPTIMEEDAFQLPGLGTPPITKLTVLEEDEKKPVPWESHNSSETCGLPTLVQTYVLQGDPRAVSTQPQSQSGTSDQVLYGQLLGSPTSPGPGHYLRCDSTQPLLAGLTPSPKSYENLWFQASPLGTLVTPAPSQEDDCVFGPLLNFPLLQGIRVHGMEALGSF

SEQ ID NO: 16657 - protein, 972 aa, Homo Sapiens; identical to SEQ ID NO: 3582

SEQ ID NO: 16658 - protein, 400 aa, Homo Sapiens; identical to SEQ ID NO: 3591

SEQ ID NO: 16659 - protein, 976 aa, Homo Sapiens [sequence omitted]

SEQ ID NO: 16660 - protein, 1097 aa, Homo Sapiens; identical to SEQ ID NO: 7860

SEQ ID NO: 16661 - protein, 455 aa, Homo Sapiens; identical to SEQ ID NO: 13589

SEQ ID NO: 16662 - protein, 461 aa, Homo Sapiens; identical to SEQ ID NO: 13591

SEQ ID NO: 16663 - protein, 569 aa, Homo Sapiens; identical to SEQ ID NO: 6962

SEQ ID NO: 16664 - protein, 551 aa, Homo Sapiens; identical to SEQ ID NO: 7030

SEQ ID NO: 16665 - protein, 378 aa, Homo Sapiens; identical to SEQ ID NO: 7076

SEQ ID NO: 16666 - protein, 825 aa, Homo Sapiens; identical to SEQ ID NO: 7097

SEQ ID NO: 16667 - protein, 468 aa, Homo Sapiens; identical to SEQ ID NO: 7125

SEQ ID NO: 16668 - protein, 459 aa, Homo Sapiens [sequence omitted]

SEQ ID NO: 16669 - protein, 918 aa, Homo Sapiens; identical to SEQ ID NO: 7130

SEQ ID NO: 16670 - protein, 369 aa, Homo Sapiens
MLKPSLPFTSLLFLQLPLLGVGLNTTILTPNGNEDTTADFFLTTMPTDSLSVSTLPLPEVQCFVFNVEYMNCTWNSSSEPQPTNLTLHYWYKNSDNDKVQKCSHYLFSEEITSGCQLQKKEIHLYQTFVVQLQDPREPRRQATQMLKLQNLVIPWAPENLTLHKLSESQLELNWNNRFLNHCLEHLVQYRTDWDHSWTEQSVDYRHKFSLPSVDGQKRYTFRVRSRFNPLCGSAQHWSEWSHPIHWGSNTSKENPFLFALEAVVISVGSMGLIISLLCVYFWLERTMPRIPTLKNLEDLVTEYHGNFSAWSGVSKGLAESLQPDYSERLCLVSEIPPKGGALGEGPGASPCNQHSPYWAPPCYTLKPET

SEQ ID NO: 16671 - protein, 234 aa, Homo Sapiens
MDPGLQQALNGMAPPGDTAMHVPAGSVASHLGTTSRSYFYLTTATLALCLVFTVATIMVLVVQRTDSIPNSPDNVPLKGGNCSEDLLCILKRAPFKKSWAYLQVAKHLNKTKLSWNKDGILHGVRYQDGNLVIQFPGLYFIICQLQFLVQCPNNSVDLKLELLINKHIKKQALVTVCESGMQTKHVYQNLSQFLLDYLQVNTTISVNVDTFQYIDTSTFPLENVLSIFLYSNSD

SEQ ID NO: 16672 - protein, 261 aa, Homo Sapiens
MIETYNQTSPRSAATGLPISMKIFMYLLTVFLITQMIGSALFAVYLHRRLDKIEDERNLHEDFVFMKTIQRCNTGERSLSLLNCEEIKSQFEGFVKDIMLNKEETKKENSFEMQKGDQNPQIAAHVISEASSKTTSVLQWAEKGYYTMSNNLVTLENGKQLTVKRQGLYYIYAQVTFCSNREASSQAPFIASLCLKSPGRFERILLRAANTHSSAKPCGQQSIHLGGVFELQPGASVFVNVTDPSQVSHGTGFTSFGLLKL

SEQ ID NO: 16673 - protein, 281 aa, Homo Sapiens; identical to SEQ ID NO: 16510

SEQ ID NO: 16674 - protein, 662 aa, Homo Sapiens; identical to SEQ ID NO: 6869

SEQ ID NO: 16675 - protein, 427 aa, Homo Sapiens; identical to SEQ ID NO: 6880

SEQ ID NO: 16676 - protein, 380 aa, Homo Sapiens
MAFVCLAIGCLYTFLISTTFGCTSSSDTEIKVNPPQDFEIVDPGYLGYLYLQWQPPLSLDHFKECTVEYELKYRNIGSETWKTIITKNLHYKDGFDLNKGIEAKIHTLLPWQCTNGSEVQSSWAETTYWISPQGIPETKVQDMDCVYYNWQYLLCSWKPGIGVLLDTNYNLFYWYEGLDHALQCVDYIKADGQNIGCRFPYLEASDYKDFYICVNGSSENKPIRSSYFTFQLQNIVKPLPPVYLTFTRESSCEIKLKWSIPLGPIPARCFDYEIEIREDDTTLVTATVENETYTLKTTNETRQLCFVVRSKVNIYCSDDGIWSEWSDKQCWEGEDLSKKTLLRFWLPFGFILILVIFVTGLLLRKPNTYPKMIPEFFCDT

SEQ ID NO: 16677 - protein, 272 aa, Homo Sapiens
MDSYLLMWGLLTFIMVPGCQAELCDDDPPEIPHATFKAMAYKEGTMLNCECKRGFRRIKSGSLYMLCTGNSSHSSWDNQCQCTSSATRNTTKQVTPQPEEQKERKTTEMQSPMQPVDQASLPGHCREPPPWENEATERIYHFVVGQMVYYQCVQGYRALHRGPAESVCKMTHGKTRWTQPQLICTGEMETSQFPGEEKPQASPEGRPESETSCLVTTTDFQIQTEMAATMETSIFTTEYQVAVAGCVFLLISVLLLSGLTWQRRQRKSRRTI

SEQ ID NO: 16678 - protein, 260 aa, Homo Sapiens
MARPHPWWLCVLGTLVGLSATPAPKSCPERHYWAQGKLCCQMCEPGTFLVKDCDQHRKAAQCDPCIPGVSFSPDHHTRPHCESCRHCNSGLLVRNCTITANAECACRNGWQCRDKECTECDPLPNPSLTARSSQALSPHPQPTHLPYVSEMLEARTAGHMQTLADFRQLPARTLSTHWPPQRSLCSSDFIRILVIFSGMFLVFTLAGALFLHQRRKYRSNKGESPVEPAEPCHYSCPREEEGSTIPIQEDYRKPEPACSP

SEQ ID NO: 16679 - protein, 595 aa, Homo Sapiens
MRVLLAALGLLFLGALRAFPQDRPFEDTCHGNPSHYYDKAVRRCCYRCPMGLFPTQQCPQRPTDCRKQCEPDYYLDEADRCTACVTCSRDDLVEKTPCAWNSSRVCECRPGMFCSTSAVNSCARCFFHSVCPAGMIVKFPGTAQKNTVCEPASPGVSPACASPENCKEPSSGTIPQAKPTPVSPATSSASTMPVRGGTRLAQEAASKLTRAPDSPSSVGRPSSDPGLSPTQPCPEGSGDCRKQCEPDYYLDEAGRCTACVSCSRDDLVEKTPCAWNSSRTCECRPGMICATSATNSCARCVPYPICAAETVTKPQDMAEKDTTFEAPPLGTQPDCNPTPENGEAPASTSPTQSLLVDSQASKTLPIPTSAPVALSSTGKPVLDAGPVLFWVILVLVVVVGSSAFLLCHRRACRKRIRQKLHLCYPVQTSQPKLELVDSRPRRSSTQLRSGASVTEPVAEERGLMSQPLMETCHSVGAAYLESLPLQDASPAGGPSSPRDLPEPRVSTEHTNNKIEKIYIMKADTVIVGTVKAELPEGRGLAGPAEPELEEELEADHTPHYPEQETEPPLGSCSDVMLSVEEEGKEDPLPTAASGK

SEQ ID NO: 16680 - protein, 458 aa, Homo Sapiens; identical to SEQ ID NO: 2334

SEQ ID NO: 16681 - protein, 277 aa, Homo Sapiens; identical to SEQ ID NO: 2337

SEQ ID NO: 16682 - protein, 193 aa, Homo Sapiens
MPEEGSGCSVRRRPYGCVLRAALVPLVAGLVICLVVCIQRFAQAQQQLPLESLGWDVAELQLNHTGPQQDPRLYWQGGPALGRSFLHGPELDKGQLRIHRDGIYMVHIQVTLAICSSTTASRHHPTTLAVGICSPASRSISLLRLSFHQGCTIASQRLTPLARGDTLCTNLTGTLLPSRNTDETFFGVQWVRP

SEQ ID NO: 16683 - protein, 335 aa, Homo Sapiens; identical to SEQ ID NO: 5109

SEQ ID NO: 16684 - protein, 400 aa, Homo Sapiens; identical to SEQ ID NO: 3591

SEQ ID NO: 16685 - protein, 489 aa, Homo Sapiens; identical to SEQ ID NO: 6747

SEQ ID NO: 16686 - protein, 398 aa, Homo Sapiens; identical to SEQ ID NO: 6966

SEQ ID NO: 16687 - protein, 897 aa, Homo Sapiens
MVLAQGLLSMALLALCWERSLAGAEETIPLQTLRCYNDYTSHITCRWADTQDAQRLVNVTLIRRVNEDLLEPVSCDLSDDMPWSACPHPRCVPRRCVIPCQSFVVTDVDYFSFQPDRPLGTRLTVTLTQHVQPPEPRDLQISTDQDHFLLTWSVALGSPQSHWLSPGDLEFEVVYKRLQDSWEDAAILLSNTSQATLGPEHLMPSSTYVARVRTRLAPGSRLSGRPSKWSPEVCWDSQPGDEAQPQNLECFFDGAAVLSCSWEVRKEVASSVSFGLFYKPSPDAGEEECSPVLREGLGSLHTRHHCQIPVPDPATHGQYIVSVQPRRAEKHIKSSVNIQMAPPSLNVTKDGDSYSLRWETMKMRYEHIDHTFEIQYRKDTATWKDSKTETLQNAHSMALPALEPSTRYWARVRVRTSRTGYNGIWSEWSEARSWDTESVLPMWVLALIVIFLTIAVLLALRFCGIYGYRLRRKWEEKIPNPSKSHLFQNGSAELWPPGSMSAFTSGSPPHQGPWGSRFPELEGVFPVGFGDSEVSPLTIEDPKHVCDPPSGPDTTPAASDLPTEQPPSPQPGPPAASHTPEKQASSFDFNGPYLGPPHSRSLPDILGQPEPPQEGGSQKSPPPGSLEYLCLPAGGQVQLVPLAQAMGPGQAVEVERRPSQGAAGSPSLESGGGPAPPALGPRVGGQDQKDSPVAIPMSSGDTEDPGVASGYVSSADLVFTPNSGASSVSLVPSLGLPSDQTPSLCPGLASGPPGAPGPVKSGFEGYVELPPIEGRSPRSPRNNPVPPEAKSPVLNPGERPADVSPTSPQPEGLLVLQQVGDYCFLPGLGPGPLSLRSKPSSPGPGPEIKNLDQAFQVKKPPGQAVPQVPVIQLFKALKQQDYLSLPPWEVNKPGEVC

SEQ ID NO: 16688 - protein, 897 aa, Homo Sapiens; identical to SEQ ID NO: 16687

SEQ ID NO: 16689 - protein, 255 aa, Homo Sapiens; identical to SEQ ID NO: 14706

SEQ ID NO: 16690 - protein, 578 aa, Homo Sapiens
MLPCLVVLLAALLSLRLGSDAHGTELPSPPSVWFEAEFFHHILHWTPIPNQSESTCYEVALLRYGIESWNSISNCSQTLSYDLTAVTLDLYHSNGYRARVRAVDGSRHSNWTVTNTRFSVDEVTLTVGSVNLEIHNGFILGKIQLPRPKMAPANDTYESIFSHFREYEIAIRKVPGNFTFTHKKVKHENFSLLTSGEVGEFCVQVKPSVASRSNKGMWSKEECISLTRQYFTVTNVIIFFAFVLLLSGALAYCLALQLYVRRRKKLPSVLLFKKPSPFIFISQRPSPETQDTIHPLDEEAFLKVSPELKNLDLHGSTDSGFGSTKPSLQTEEPQFLLPDPHPQADRTLGNREPPVLGDSCSSGSSNSTDSGICLQEPSLSPSTGPTWEQQVGSNSRGQDDSGIDLVQNSEGRAGDTQGGSALGHHSPPEPEVPGEEDPAAVAFQGYLRQTRCAEEKATKTGCLEEESPLTDGLGPKFGRCLVDEAGLHPPALAKGYLKQDPLEMTLASSGAPTGQWNQPTEEWSLLALSSCSDLGISDWSFAHDLAPLGCVAAPGGLLGSFNSDLVTLPLISSLQSSE

SEQ ID NO: 16691 - protein, 866 aa, Homo Sapiens; identical to SEQ ID NO: 6906

SEQ ID NO: 16692 - protein, 397 aa, Homo Sapiens; identical to SEQ ID NO: 3787

SEQ ID NO: 16693 - protein, 355 aa, Homo Sapiens
MDQFPESVTENFEYDDLAEACYIGDIVVFGTVFLSIFYSVIFAIGLVGNLLVVFALTNSKKPKSVTDIYLLNLALSDLLFVATLPFWTHYLINEKGLHNAMCKFTTAFFFIGFFGSIFFITVISIDRYLAIVLAANSMNNRTVQHGVTISLGVWAAAILVAAPQFMFTKQKENECLGDYPEVLQEIWPVLRNVETNFLGFLLPLLIMSYCYFRIIQTLFSCKNHKKAKAIKLILLVVIVFFLFWTPYNVMIFLETLKLYDFFPSCDMRKDLRLALSVTETVAFSHCCLNPLIYAFAGEKFRRYLYHLYGKCLAVLCGRSVHVDFSSSESQRSRHGSVLSSNFTYHTSDGDALLLL

SEQ ID NO: 16694 - protein, 107 aa, Homo Sapiens; identical to SEQ ID NO: 3795

SEQ ID NO: 16695 - protein, 98 aa, Homo Sapiens; identical to SEQ ID NO: 3796

SEQ ID NO: 16696 - protein, 94 aa, Homo Sapiens; identical to SEQ ID NO: 3797

SEQ ID NO: 16697 - protein, 93 aa, Homo Sapiens; identical to SEQ ID NO: 3801

SEQ ID NO: 16698 - protein, 109 aa, Homo Sapiens; identical to SEQ ID NO: 3805

SEQ ID NO: 16699 - protein, 111 aa, Homo Sapiens; identical to SEQ ID NO: 3807

SEQ ID NO: 16700 - protein, 254 aa, Homo Sapiens
MGRDLRPGSRVLLLLLLLLLVYLTQPGNGNEGSVTGSCYCGKRISSDSPPSVQFMNRLRKHLRAYHRCLYYTRFQLLSWSVCGGNKDPWVQELMSCLDLKECGHAYSGIVAHQKHLLPTSPPISQASEGASSDIHTPAQMLLSTLQSTQRPTLPVGSLSSDKELTRPNETTIHTAGHSLAAGPEAGENQKQPEKNAGPTARTSATVPVLCLLAIIFILTAALSYVLCKRRRGQSPQSSPDLPVHYIPVAPDSNT

SEQ ID NO: 16701 - protein, 107 aa, Homo Sapiens; identical to SEQ ID NO: 3810

SEQ ID NO: 16702 - protein, 107 aa, Homo Sapiens; identical to SEQ ID NO: 3811

SEQ ID NO: 16703 - protein, 101 aa, Homo Sapiens; identical to SEQ ID NO: 10258

SEQ ID NO: 16704 - protein, 114 aa, Homo Sapiens; identical to SEQ ID NO: 3812

SEQ ID NO: 16705 - protein, 114 aa, Homo Sapiens; identical to SEQ ID NO: 3814

SEQ ID NO: 16706 - protein, 128 aa, Homo Sapiens; identical to SEQ ID NO: 10670

SEQ ID NO: 16707 - protein, 99 aa, Homo Sapiens; identical to SEQ ID NO: 3816

SEQ ID NO: 16708 - protein, 125 aa, Homo Sapiens; identical to SEQ ID NO: 3817

SEQ ID NO: 16709 - protein, 350 aa, Homo Sapiens
MSNITDPQMWDFDDLNFTGMPPADEDYSPCMLETETLNKYVVIIAYALVFLLSLLGNSLVMLVILYSRVGRSVTDVYLLNLALADLLFALTLPIWAASKVNGWIFGTFLCKVVSLLKEVNFYSGILLLACISVDRYLAIVHATRTLTQKRHLVKFVCLGCWGLSMNLSLPFFLFRQAYHPNNSSPVCYEVLGNDTAKWRMVLRILPHTFGFIVPLFVMLFCYGFTLRTLFKAHMGQKHRAMRVIFAVVLIFLLCWLPYNLVLLADTLMRTQVIQESCERRNNIGRALDATEILGFLHSCLNPIIYAFIGQNFRHGFLKILAMHGLVSKEFLARHRVTSYTSSSVNVSSNL

SEQ ID NO: 16710 - protein, 360 aa, Homo Sapiens
MEDFNMESDSFEDFWKGEDLSNYSYSSTLPPFLLDAAPCEPESLEINKYFVVIIYALVFLLSLLGNSLVMLVILYSRVGRSVTDVYLLNLALADLLFALTLPIWAASKVNGWIFGTFLCKVVSLLKEVNFYSGILLLACISVDRYLAIVHATRTLTQKRYLVKFICLSIWGLSLLLALPVLLFRRTVYSSNVSPACYEDMGNNTANWRMLLRILPQSFGFIVPLLIMLFCYGFTLRTLFKAHMGQKHRAMRVIFAVVLIFLLCWLPYNLVLLADTLMRTQVIQETCERRNHIDRALDATEILGILHSCLNPLIYAFIGQKFRHGLLKILAIHGLISKDSLPKDSRPSFVGSSSGHTSTTL

SEQ ID NO: 16711 - protein, 368 aa, Homo Sapiens
MVLEVSDHQVLNDAEVAALLENFSSSYDYGENESDSCCTSPPCPQDFSLNFDRAFLPALYSLLFLLGLLGNGAVAAVLLSRRTALSSTDTFLLHLAVADTLLVLTLPLWAVDAAVQWVFGSGLCKVAGALFNINFYAGALLLACISFDRYLNIVHATQLYRRGPPARVTLTCLAVWGLCLLFALPDFIFLSAHHDERLNATHCQYNFPQVGRTALRVLQLVAGFLLPLLVMAYCYAHILAVLLVSRGQRRLRAMRLVVVVVVAFALCWTPYHLVVLVDILMDLGALARNCGRESRVDVAKSVTSGLGYMHCCLNPLLYAFVGVKFRERMWMLLLRLGCPNQRGLQRQPSSSRRDSSWSETSEASYSGL

SEQ ID NO: 16712 - protein, 352 aa, Homo Sapiens
MEGISIYTSDNYTEEMGSGDYDSMKEPCFREENANFNKIFLPTIYSIIFLTGIVGNGLVILVMGYQKKLRSMTDKYRLHLSVADLLFVITLPFWAVDAVANWYFGNFLCKAVHVIYTVNLYSSVLILAFISLDRYLAIVHATNSQRPRKLLAEKVVYVGVWIPALLLTIPDFIFANVSEADDRYICDRFYPNDLWVVVFQFQHIMVGLILPGIVILSCYCIIISKLSHSKGHQKRKALKTTVILILAFFACWLPYYIGISIDSFILLEIIKQGCEFENTVHKWISITEALAFFHCCLNPILYAFLGAKFKTSAQHALTSVSRGSSLKILSKGKRGGHSSVSTESESSSFHSS

SEQ ID NO: 16713 - protein, 372 aa, Homo Sapiens
MNYPLTLEMDLENLEDLFWELDRLDNYNDTSLVENHLCPATEGPLMASFKAVFVPVAYSLIFLLGVIGNVLVLVILERHRQTRSSTETFLFHLAVADLLLVFILPFAVAEGSVGWVLGTFLCKTVIALHKVNFYCSSLLLACIAVDRYLAIVHAVHAYRHRRLLSIHITCGTIWLVGFLLALPEILFAKVSQGHHNNSLPRCTFSQENQAETHAWFTSRFLYHVAGFLLPMLVMGWCYVGVVHRLRQAQRRPQRQKAVRVAILVTSIFFLCWSPYHIVIFLDTLARLKAVDNTCKLNGSLPVAITMCEFLGLAHCCLNPMLYTFAGVKFRSDLSRLLTKLGCTGPASLCQLFPSWRRSSLSESENATSLTTF

SEQ ID NO: 16714 - protein, 342 aa, Homo Sapiens
MAEHDYHEDYGFSSFNDSSQEEHQDFLQFSKVFLPCMYLVVFVCGLVGNSLVLVISIFYHKLQSLTDVFLVNLPLADLVFVCTLPFWAYAGIHEWVFGQVMCKSLLGIYTINFYTSMLILTCITVDRFIVVVKATKAYNQQAKRMTWGKVTSLLIWVISLLVSLPQIIYGNVFNLDKLICGYHDEAISTVVLATQMTLGFFLPLLTMIVCYSVIIKTLLHAGGFQKHRSLKIIFLVMAVFLLTQMPFNLMKFIRSTHWEYYAMTSFHYTIMVTEAIAYLRACLNPVLYAFVSLKFRKNFWKLVKDIGCLPYLGVSHQWKSSEDNSKTFSASHNVEATSMFQL

SEQ ID NO: 16715 - protein, 362 aa, Homo Sapiens
MDLHLFDYSEPGNFSDISWPCNSSDCIVVDTVMCPNMPNKSVLLYTLSFIYIFIFVIGMIANSVVVWVNIQAKTTGYDTHCYILNLAIADLWVVLTIPVWVVSLVQHNQWPMGELTCKVTHLIFSINLFGSIFFLTCMSVDRYLSITYFTNTPSSRKKMVRRVVCILVWLLAFCVSLPDTYYLKTVTSASNNETYCRSFYPEHSIKEWLIGMELVSVVLGFAVPFSIIAVFYFLLARAISASSDQEKHSSRKIIFSYVVVFLVCWLPYHVAVLLDIFSILHYIPFTCRLEHALFTALHVTQCLSLVHCCVNPVLYSFINRNYRYELMKAFIFKYSAKTGLTKLIDASRVSETEYSALEQSTK

SEQ ID NO: 16716 - protein, 336 aa, Homo Sapiens
MGNCLHRAELSPSTENSSQLDFEDVWNSSYGVNDSFPDGDYGANLEAAAPCHSCNLLDDSALPFFILTSVLGILASSTVLFMLFRPLFRWQLCPGWPVLAQLAVGSALFSIVVPVLAPGLGSTRSSALCSLGYCVWYGSAFAQALLLGCHASLGHRLGAGQVPGLTLGLTVGIWGVAALLTLPVTLASGASGGLCTLIYSTELKALQATHTVACLAIFVLLPLGLFGAKGLKKALGMGPGPWMNILWAWFIFWWPHGVVLGLDFLVRSKLLLLSTCLAQQALDLLLNLAEALAILHCVATPLLLALFCHQATRTLLPSLPLPEGWSSHLDTLGSKS

SEQ ID NO: 16717 - protein, 193 aa, Homo Sapiens; identical to SEQ ID NO: 4835

SEQ ID NO: 16718 - protein, 508 aa, Homo Sapiens
MDHLGASLWPQVGSLCLLLAGAAWAPPPNLPDPKFESKAALLAARGPEELLCFTERLEDLVCFWEEAASAGVGPGNYSFSYQLEDEPWKLCRLHQAPTARGAVRFWCSLPTADTSSFVPLELRVTAASGAPRYHRVIHINEVVLLDAPVGLVARLADESGHVVLRWLPPPETPMTSHIRYEVDVSAGNGAGSVQRVEILEGRTECVLSNLRGRTRYTFAVRARMAEPSFGGFWSAWSEPVSLLTPSDLDPLILTLSLILVVILVLLTVLALLSHRRALKQKIWPGIPSPESEFEGLFTTHKGNFQLWLYQNDGCLWWSPCTPFTEDPPASLEVLSERCWGTMQAVEPGTDDEGPLLEPVGSEHAQDTYLVLDKWLLPRNPPSEDLPGPGGSVDIVAMDEGSEASSCSSALASKPSPEGASAASFEYTILDPSSQLLRPWTLCPELPPTPPHLKYLYLVVSDSGISTDYSSGDSQGAQGGLSDGPYSNPYENSLIPAAEPLPPSYVACS

SEQ ID NO: 16719 - protein, 993 aa, Homo Sapiens
MPALARDGGQLPLLVVFSAMIFGTITNQDLPVIKCVLINHKNNDSSVGKSSSYPMVSESPEDLGCALRPQSSGTVYEAAAVEVDVSASITLQVLVDAPGNISCLWVFKHSSLNCQPHFDLQNRGVVSMVILKMTETQAGEYLLFIQSEATNYTILFTVSIRNTLLYTLRRPYFRKMENQDALVCISESVPEPIVEWVLCDSQGESCKEESPAVVKKEEKVLHELFGTDIRCCARNELGRECTRLFTIDLNQTPQTTLPQLFLKVGEPLWIRCKAVHVNHGFGLTWELENKALEEGNYFEMSTYSTNRTMIRILFAFVSSVARNDTGYYTCSSSKHPSQSALVTIVEKGFINATNSSEDYEIDQYEEFCFSVRFKAYPQIRCTWTFSRKSFPCEQKGLDNGYSISKFCNHKHQPGEYIFHAENDDAQFTKMFTLNIRRKPQVLAEASASQASCFSDGYPLPSWTWKKCSDKSPNCTEEITEGVWNRKANRKVFGQWVSSSTLNMSEAIKGFLVKCCAYNSLGTSCETILLNSPGPFPFIQDNISFYATIGVCLLFIVVLTLLICHKYKKQFRYESQLQMVQVTGSSDNEYFYVDFREYEYDLKWEFPRENLEFGKVLGSGAFGKVMNATAYGISKTGVSIQVAVKMLKEKADSSEREALMSELKMMTQLGSHENIVNLLGACTLSGPIYLIFEYCCYGDLLNYLRSKREKFHRTWTEIFKEHNFSFYPTFQSHPNSSMPGSREVQIHPDSDQISGLHGNSFHSEDEIEYENQKRLEEEEDLNVLTFEDLLCFAYQVAKGMEFLEFKSCVHRDLAARNVLVTHGKVVKICDFGLARDIMSDSNYVVRGNARLPVKWMAPESLFEGIYTIKSDVWSYGILLWEIFSLGVNPYPGIPVDANFYKLIQNGFKMDQPFYATEEIYIIMQSCWAFDSRKRPSFPNLTSFLGCQLADAEEAMYQNVDGRVSECPHTYQNRRPFSREMDLGLLSPQAQVEDS

SEQ ID NO: 16720 - protein, 235 aa, Homo Sapiens
MTVLAPAWSPTTYLLLLLLLSSGLSGTQDCSFQHSPISSDFAVKIRELSDYLLQDYPVTVASNLQDEELCGGLWRLVLAQRWMERLKTVAGSKMQGLLERVNTEIHFVTKCAFQPPPSCLRFVQTNISRLLQETSEQLVALKPWITRQNFSRCLELQCQPDSSTLPPPWSPRPLEATAPTAPQPPLLLLLLLPVGLLLLAAAWCLHWQRTRRRTPRPGEQVPPVPSPQDLLLVEH

SEQ ID NO: 16721 - protein, 836 aa, Homo Sapiens; identical to SEQ ID NO: 16656

SEQ ID NO: 16722 - protein, 241 aa, Homo Sapiens; identical to SEQ ID NO: 13579

SEQ ID NO: 16723 - protein, 199 aa, Homo Sapiens; identical to SEQ ID NO: 14709

SEQ ID NO: 16724 - protein, 897 aa, Homo Sapiens; identical to SEQ ID NO: 16687

SEQ ID NO: 16725 - protein, 918 aa, Homo Sapiens; identical to SEQ ID NO: 7130

SEQ ID NO: 16726 - protein, 283 aa, Homo Sapiens; identical to SEQ ID NO: 13574

SEQ ID NO: 16727 - protein, 166 aa, Homo Sapiens; identical to SEQ ID NO: 6744

SEQ ID NO: 16728 - protein, 337 aa, Homo Sapiens
MRPTLLWSLLLLLGVFAAAAAAPPDPLSQLPAPQHPKIRLYNAEQVLSWEPVALSNSTRPVVYQVQFKYTDSKWFTADIMSIGVNCTQITATECDFTAASPSAGFPMDFNVTLRLRAELGALHSAWVTMPWFQHYRNVTVGPPENIEVTPGEGSLIIRFSSPFDIADTSTAFFCYYVHYWEKGGIQQVKGPFRSNSISLDNLKPSRVYCLQVQAQLLWNKSNIFRVGHLSNISCYETMADASTELQQVILISVGTFSLLSVLAGACFFLVLKYRGLIKYWFHTPPSIPLQIEEYLKDPTQPILEALDKDSSPKDDVWDSVSIISFPEKEQEDVLQTL

SEQ ID NO: 16729 - protein, 189 aa, Homo Sapiens; identical to SEQ ID NO: 6725

SEQ ID NO: 16730 - protein, 187 aa, Homo Sapiens; identical to SEQ ID NO: 6742

SEQ ID NO: 16731 - protein, 271 aa, Homo Sapiens
MAKVPDMFEDLKNCYSENEEDSSSIDHLSLNQKSFYHVSYGPLHEGCMDQSVSLSISETSKTSKLTFKESMVVVATNGKVLKKRRLSLSQSITDDDLEAIANDSEEEIIKPRSAPFSFLSNVKYNFMRIIKYEFILNDALNQSIIRANDQYLTAAALHNLDEAVKFDMGAYKSSKDDAKITVILRISKTQLYVTAQDEDQPVLLKEMPEIPKTITGSETNLLFFWETHGTKNYFTSVAHPNLFIATKQDYWVCLAGGPPSITDFQILENQA

SEQ ID NO: 16732 - protein, 178 aa, Homo Sapiens; identical to SEQ ID NO: 6848

SEQ ID NO: 16733 - protein, 578 aa, Homo Sapiens; identical to SEQ ID NO: 16690

SEQ ID NO: 16734 - protein, 199 aa, Homo Sapiens; identical to SEQ ID NO: 6850

SEQ ID NO: 16735 - protein, 422 aa, Homo Sapiens; identical to SEQ ID NO: 6858

SEQ ID NO: 16736 - protein, 219 aa, Homo Sapiens
MCPARSLLLVATLVLLDHLSLARNLPVATPDPGMFPCLHHSQNLLRAVSNMLQKARQTLEFYPCTSEEIDHEDITKDKTSTVEACLPLELTKNESCLNSRETSFITNGSCLASRKTSFMMALCLSSIYEDLKMYQVEFKTMNAKLLMDPKRQIFLDQNMLAVIDELMQALNFNSETVPQKSSLEEPDFYKTKIKLCILLHAFRIRAVTIDRVMSYLNAS

SEQ ID NO: 16737 - protein, 146 aa, Homo Sapiens [sequence omitted]

SEQ ID NO: 16738 - protein, 427 aa, Homo Sapiens; identical to SEQ ID NO: 6880

SEQ ID NO: 16739 - protein, 546 aa, Homo Sapiens
MKNQDKKNGAAKQSNPKSSPGQPEAGPEGAQERPSQAAPAVEAEGPGSSQAPRKPEGAQARTAQSGALRDVSEELSRQLEDILSTYCVDNNQGGPGEDGAQGEPAEPEDAEKSRTYVARNGEPEPTPVVNGEKEPSKGDPNTEEIRQSDEVGDRDHRRPQEKKKAKGLGKEITLLMQTLNTLSTPEEKLAALCKKYAELLEEHRNSQKQMKLLQKKQSQLVQEKDHLRGEHSKAVLARSKLESLCRELQRHNRSLKEEGVQRAREEEEKRKEVTSHFQVTLNDIQLQMEQHNERNSKLRQENMELAERLKKLIEQYELREEHIDKVFKHKDLQQQLVDAKLQQAQEMLKEAEERHQREKDFLLKEAVESQRMCELMKQQETHLKQQLALYTEKFEEFQNTLSKSSEVFTTFKQEMEKMTKKIKKLEKETTMYRSRWESSNKALLEMAEEKTVRDKELEGLQVKIQRLEKLCRALQTERNDLNKRVQDLSAGGQGSLTDSGPERRPEGPGAQAPSSPRVTEAPCYPGAPSTEASGQTGPQEPTSARA

SEQ ID NO: 16740 - protein, 162 aa, Homo Sapiens
MRISKPHLRSISIQCYLCLLLNSHFLTEAGIHVFILGCFSAGLPKTEANWVNVISDLKKIEDLIQSMHIDATLYTESDVHPSCKVTAMKCFLLELQVISLESGDASIHDTVENLIILANNSLSSNGNVTESGCKECEELEEKNIKEFLQSFVHIVQMFINTS

SEQ ID NO: 16741 - protein, 267 aa, Homo Sapiens; identical to SEQ ID NO: 6891

SEQ ID NO: 16742 - protein, 1332 aa, Homo Sapiens
MESHSRAGKSRKSAKFRSISRSLMLCNAKTSDDGSSPDEKYPDPFEISLAQGKEGIFHSSVQLADTSEAGPSSVPDLALASEAAQLQAAGNDRGKTCRRIFFMKESSTASSREKPGKLEAQSSNFLFPKACHQRARSNSTSVNPYCTREIDFPMTKKSAAPTDRQPYSLCSNRKSLSQQLDCPAGKAAGTSRPTRSLSTAQLVQPSGGLQASVISNIVLMKGQAKGLGFSIVGGKDSIYGPIGIYVKTIFAGGAAAADGRLQEGDEILELNGESMAGLTHQDALQKFKQAKKGLLTLTVRTRLTAPPSLCSHLSPPLCRSLSSSTCITKDSSSFALESPSAPISTAKPNYRIMVEVSLQKEAGVGLGIGLCSVPYFQCISGIFVHTLSPGSVAHLDGRLRCGDEIVEISDSPVHCLTLNEVYTILSHCDPGPVPIIVSRHPDPQVSEQQLKEAVAQAVENTKFGKERHQWSLEGVKRLESSWHGRPTLEKEREKNSAPPHRRAQKVMIRSSSDSSYMSGSPGGSPGSGSAEKPSSDVDISTHSPSLPLAREPVVLSIASSRLPQESPPLPESRDSHPPLRLKKSFEILVRKPMSSKPKPPPRKYFKSDSDPQKSLEERENSSCSSGHTPPTCGQEARELLPLLLPQEDTAGRSPSASAGCPGPGIGPQTKSSTEGEPGWRRASPVTQTSPIKHPLLKRQARMDYSFDTTAEDPWVRISDCIKNLFSPIMSENHGHMPLQPNASLNEEEGTQGHPDGTPPKLDTANGTPKVYKSADSSTVKKGPPVAPKPAWFRQSLKGLRNRASDPRGLPDPALSTQPAPASREHLGSHIRASSSSSSIRQRISSFETFGSSQLPDKGAQRLSLQPSSGEAAKPLGKHEEGRFSGLLGRGAAPTLVPQQPEQVLSSGSPAASEARDPGVSESPPPGRQPNQKTLPPGPDPLLRLLSTQAEESQGPVLKMPSQRARSFPLTRSQSCETKLLDEKTSKLYSISSQVSSAVMKSLLCLPSSISCAQTPCIPKEGASPTSSSNEDSAANGSAETSALDTGFSLNLSELREYTEGLTEAKEDDDGDHSSLQSGQSVISLLSSEELKKLIEEVKVLDEATLKQLDGIHVTILHKEEGAGLGFSLAGGADLENKVITVHRVFPNGLASQEGTIQKGNEVLSINGKSLKGTTHHDALAILRQAREPRQAVIVTRKLTPEAMPDLNSSTDSAASASAASDVSVESTAEATVCTVTLEKMSAGLGFSLEGGKGSLHGDKPLTINRIFKGAASEQSETVQPGDEILQLGGTAMQGLTRFEAWNIIKALPDGPVTIVIRRKSLQSKETTAAGDS

SEQ ID NO: 16743 - protein, 155 aa, Homo Sapiens; identical to SEQ ID NO: 6899

SEQ ID NO: 16744 - protein, 866 aa, Homo Sapiens; identical to SEQ ID NO: 6906

SEQ ID NO: 16745 - protein, 193 aa, Homo Sapiens
MAAEPVEDNCINFVAMKFIDNTLYFIAEDDENLESDYFGKLESKLSVIRNLNDQVLFIDQGNRPLFEDMTDSDCRDNAPRTIFIISMYKDSQPRGMAVTISVKCEKISTLSCENKIISFKEMNPPDNIKDTKSDIIFFQRSVPGHDNKMQFESSSYEGYFLACEKERDLFKLILKKEDELGDRSIMFTVQNED

SEQ ID NO: 16746 - protein, 569 aa, Homo Sapiens; identical to SEQ ID NO: 6962

SEQ ID NO: 16747 - protein, 271 aa, Homo Sapiens; identical to SEQ ID NO: 16731

SEQ ID NO: 16748 - protein, 269 aa, Homo Sapiens
MAEVPELASEMMAYYSGNEDDLFFEADGPKQMKCSFQDLDLCPLDGGIQLRISDHHYSKGFRQAASVVVAMDKLRKMLVPCPQTFQENDLSTFFPFIFEEEPIFFDTWDNEAYVHDAPVRSLNCTLRDSQQKSLVMSGPYELKALHLQGQDMEQQVVFSMSFVQGEESNDKIPVALGLKEKNLYLSCVLKDDKPTLQLESVDPKNYPKKKMEKRFVFNKIEINNKLEFESAQFPNWYISTSQAENMPVFLGGTKGGQDITDFTMQFVSS

SEQ ID NO: 16749 - protein, 153 aa, Homo Sapiens; identical to SEQ ID NO: 6997

SEQ ID NO: 16750 - protein, 176 aa, Homo Sapiens; identical to SEQ ID NO: 6998

SEQ ID NO: 16751 - protein, 553 aa, Homo Sapiens; identical to SEQ ID NO: 7004

SEQ ID NO: 16752 - protein, 311 aa, Homo Sapiens
MQTFTMVLEEIWTSLFMWFFYALIPCLLTDEVAILPAPQNLSVLSTNMKHLLMWSPVIAPGETVYYSVEYQGEYESLYTSHIWIPSSWCSLTEGPECDVTDDITATVPYNLRVRATLGSQTSAWSILKHPFNRNSTILTRPGMEITKDGFHLVIELEDLGPQFEFLVAYWRREPGAEEHVKMVRSGGIPVHLETMEPGAAYCVKAQTFVKAIGRYSAFSQTECVEVQGEAIPLVLALFAFVGFMLILVVVPLFVWKMGRLLQYSCCPVVVLPDTLKITNSPQKLISCRREEVDACATAVMSPEELLRAWIS

SEQ ID NO: 16753 - protein, 155 aa, Homo Sapiens
MERIVICLMVIFLGTLVHKSSSQGQDRHMIRMRQLIDIVDQLKNYVNDLVPEFLPAPEDVETNCEWSAFSCFQKAQLKSANTGNNERIINVSIKKLKRKPPSTNAGRRQKHRLTCPSCDSYEKKPPKEFLERFKSLLQKMIHQHLSSRTHGSEDS

SEQ ID NO: 16754 - protein, 152 aa, Homo Sapiens; identical to SEQ ID NO: 7032

SEQ ID NO: 16755 - protein, 229 aa, Homo Sapiens; identical to SEQ ID NO: 4493

SEQ ID NO: 16756 - protein, 153 aa, Homo Sapiens [sequence omitted]

SEQ ID NO: 16757 - protein, 825 aa, Homo Sapiens; identical to SEQ ID NO: 7097

SEQ ID NO: 16758 - protein, 134 aa, Homo Sapiens; identical to SEQ ID NO: 7105

SEQ ID NO: 16759 - protein, 420 aa, Homo Sapiens; identical to SEQ ID NO: 7108

SEQ ID NO: 16760 - protein, 212 aa, Homo Sapiens; identical to SEQ ID NO: 7120

SEQ ID NO: 16761 - protein, 468 aa, Homo Sapiens; identical to SEQ ID NO: 7125

SEQ ID NO: 16762 - protein, 177 aa, Homo Sapiens; identical to SEQ ID NO: 7141

SEQ ID NO: 16763 - protein, 521 aa, Homo Sapiens
MGLGRCIWEGWTLESEALRRDMGTWLLACICICTCVCLGVSVTGEGQGPRSRTFTCLTNNILRIDCHWSAPELGQGSSPWLLFTSNQAPGGTHKCILRGSECTVVLPPEAVLVPSDNFTITFHHCMSGREQVSLVDPEYLPRRHVKLDPPSDLQSNISSGHCILTWSISPALEPMTTLLSYELAFKKQEEAWEQAQHRDHIVGVTWLILEAFELDPGFIHEARLRVQMATLEDDVVEEERYTGQWSEWSQPVCFQAPQRQGPLIPPWGWPGNTLVAVSIFLLLTGPTYLLFKLSPRVKRIFYQNVPSPAMFFQPLYSVHNGNFQTWMGAHGAGVLLSQDCAGTPQGALEPCVQEATALLTCGPARPWKSVALEEEQEGPGTRLPGNLSSEDVLPAGCTEWRVQTLAYLPQEDWAPTSLTRPAPPDSEGSRSSSSSSSSNNNNYCALGCYGGWHLSALPGNTQSSGPIPALACGLSCDHQGLETQQGVAWVLAGHCQRPGLHEDLQGMLLPSVLSKARSWTF

SEQ ID NO: 16764 - protein, 202 aa, Homo Sapiens; identical to SEQ ID NO: 7856

SEQ ID NO: 16765 - protein, 1097 aa, Homo Sapiens; identical to SEQ ID NO: 7860

SEQ ID NO: 16766 - protein, 240 aa, Homo Sapiens
MEESVVRPSVFVVDGQTDIPFTRLGRSHRRQSCSVARVGLGLLLLLMGAGLAVQGWFLLQLHWRLGEMVTRLPDGPAGSWEQLIQERRSHEVNPAAHLTGANSSLTGSGGPLLWETQLGLAFLRGLSYHDGALVVTKAGYYYIYSKVQLGGVGCPLGLASTITHGLYKRTPRYPEELELLVSQQSPCGRATSSSRVWWDSSFLGGVVHLEAGEKVVVRVLDERLVRLRDGTRSYFGAFMV

SEQ ID NO: 16767 - protein, 435 aa, Homo Sapiens; identical to SEQ ID NO: 8143

SEQ ID NO: 16768 - protein, 244 aa, Homo Sapiens
MGALGLEGRGGRLQGRGSLLLAVAGATSLVTLLLAVPITVLAVLALVPQDQGGLVTETADPGAQAQQGLGFQKLPEEEPETDLSPGLPAAHLIGAPLKGQGLGWETTKEQAFLTSGTQFSDAEGLALPQDGLYYLYCLVGYRGRAPPGGGDPQGRSVTLRSSLYRAGGAYGPGTPELLLEGAETVTPVLDPARRQGYGPLWYTSVGFGGLVQLRRGERVYVNISHPDMVDFARGKTFFGAVMVG

SEQ ID NO: 16769 - protein, 554 aa, Homo Sapiens; identical to SEQ ID NO: 3577

SEQ ID NO: 16770 - protein, 401 aa, Homo Sapiens; identical to SEQ ID NO: 13563

SEQ ID NO: 16771 - protein, 252 aa, Homo Sapiens; identical to SEQ ID NO: 9855

SEQ ID NO: 16772 - protein, 979 aa, Homo Sapiens; identical to SEQ ID NO: 9857

SEQ ID NO: 16773 - protein, 277 aa, Homo Sapiens
MCVGARRLGRGPCAALLLLGLGLSTVTGLHCVGDTYPSNDRCCHECRPGNGMVSRCSRSQNTVCRPCGPGFYNDVVSSKPCKPCTWCNLRSGSERKQLCTATQDTVCRCRAGTQPLDSYKPGVDCAPCPPGHFSPGDNQACKPWTNCTLAGKHTLQPASNSSDAICEDRDPPATQPQETQGPPARPITVQPTEAWPRTSQGPSTRPVEVPGGRAVAAILGLGLVLGLLGPLAILLALYLLRRDQRLPPDAHKPPGGGSFRTPIQEEQADAHSTLAKI

SEQ ID NO: 16774 - protein, 183 aa, Homo Sapiens
MERVQPLEENVGNAARPRFERNKLLLVASVIQGLGLLLCFTYICLHFSALQVSHRYPRIQSIKVQFTEYKKEKGFILTSQKEDEIMKVQNNSVIINCDGFYLISLKGYFSQEVNISLHYQKDEEPLFQLKKVRSVNSLMVASLTYKDKVYLNVTTDNTSLDDFHVNGGELILIHQNPGEFCVL

SEQ ID NO: 16775 - protein, 616 aa, Homo Sapiens; identical to SEQ ID NO: 13557

SEQ ID NO: 16776 - protein, 273 aa, Homo Sapiens
MKKTQTWILTCIYLQLLLFNPLVKTEGICRNRVTNNVKDVTKLVANLPKDYMITLKYVPGMDVLPSHCWISEMVVQLSDSLTDLLDKFSNISEGLSNYSIIDKLVNIVDDLVECVKENSSKDLKKSFKSPEPRLFTPEEFFRIFNRSIDAFKDFVVASETSDCVVSSTLSPEKDSRVSVTKPFMLPPVAASSLRNDSSSSNRKAKNPPGDSSLHWAAMALPALFSLIIGFAFGALYWKKRQPSLTRAVENIQINEEDNEISMLQEKEREFQEV

SEQ ID NO: 16777 - protein, 293 aa, Homo Sapiens
MSGLGRSRRGGRSRVDQEERFPQGLWTGVAMRSCPEEQYWDPLLGTCMSCKTICNHQSQRTCAAFCRSLSCRKEQGKFYDHLLRDCISCASICGQHPKQCAYFCENKLRSPVNLPPELRRQRSGEVENNSDNSGRYQGLEHRGSEASPALPGLKLSADQVALVYSTLGLCLCAVLCCFLVAVACFLKKRGDPCSCQPRSRPRQSPAKSSQDHAMEAGSPVSTSPEPVETCSFCFPECRAPTQESAVTPGTPDPTCAGRWGCHTRTTVLQPCPHIPDSGLGIVCVPAQEGGPGA

SEQ ID NO: 16778 - protein, 285 aa, Homo Sapiens
MDDSTEREQSRLTSCLKKREEMKLKECVSILPRKESPSVRSSKDGKLLAATLLLALLSCCLTVVSFYQVAALQGDLASLRAELQGHHAEKLPAGAGAPKAGLEEAPAVTAGLKIFEPPAPGEGNSSQNSRNKRAVQGPEETVTQDCLQLIADSETPTIQKGSYTFVPWLLSFKRGSALEEKENKILVKETGYFFIYGQVLYTDKTYAMGHLIQRKKVHVFGDELSLVTLFRCIQNMPETLPNNSCYSAGIAKLEEGDELQLAIPRENAQISLDGDVTFFGALKLL

SEQ ID NO: 16779 - protein, 503 aa, Homo Sapiens; identical to SEQ ID NO: 13181

SEQ ID NO: 16780 - protein, 567 aa, Homo Sapiens; identical to SEQ ID NO: 14646

SEQ ID NO: 16781 - protein, 851 aa, Homo Sapiens; identical to SEQ ID NO: 13184

SEQ ID NO: 16782 - protein, 390 aa, Homo Sapiens
MPPSGLRLLLLLLPLLWLLVLTPGRPAAGLSTCKTIDMELVKRKRIEAIRGQILSKLRLASPPSQGEVPPGPLPEAVLALYNSTRDRVAGESAEPEPEPEADYYAKEVTRVLMVETHNEIYDKFKQSTHSIYMFFNTSELREAVPEPVLLSRAELRLLRLKLKVEQHVELYQKYSNNSWRYLSNRLLAPSDSPEWLSFDVTGVVRQWLSRGGEIEGFRLSAHCSCDSRDNTLQVDINGFTTGRRGDLATIHGMNRPFLLLMATPLERAQHLQSSRHRRALDTNYCFSSTEKNCCVRQLYIDFRKDLGWKWIHEPKGYHANFCLGPCPYIWSLDTQYSKVLALYNQHNPGASAAPCCVPQALEPLPIVYYVGRKPKVEQLSNMIVRSCKCS

SEQ ID NO: 16783 - protein, 414 aa, Homo Sapiens; identical to SEQ ID NO: 13160

SEQ ID NO: 16784 - protein, 412 aa, Homo Sapiens; identical to SEQ ID NO: 13162

SEQ ID NO: 16785 - protein, 233 aa, Homo Sapiens; identical to SEQ ID NO: 16534

SEQ ID NO: 16786 - protein, 205 aa, Homo Sapiens; identical to SEQ ID NO: 8093

SEQ ID NO: 16787 - protein, 933 aa, Homo Sapiens; identical to SEQ ID NO: 13682

SEQ ID NO: 16788 - protein, 635 aa, Homo Sapiens
MPSWALFMVTSCLLLAPQNLAQVSSQDVSLLASDSEPLKCFSRTFEDLTCFWDEEEAAPSGTYQLLYAYPREKPRACPLSSQSMPHFGTRYVCQFPDQEEVRLFFPLHLWVKNVFLNQTRTQRVLFVDSVGLPAPPSIIKAMGGSQPGELQISWEEPAPEISDFLRYELRYGPRDPKNSTGPTVIQLIATETCCPALQRPHSASALDQSPCAQPTMPWQDGPKQTSPSREASALTAEGGSCLISGLQPGNSYWLQLRSEPDGISLGGSWGSWSLPVTVDLPGDAVALGLQCFTLDLKNVTCQWQQQDHASSQGFFYHSRARCCPRDRYPIWENCEEEEKTNPGLQTPQFSRCHFKSRNDSIIHILVEVTTAPGTVHSYLGSPFWIHQAVRLPTPNLHWREISSGHLELEWQHPSSWAAQETCYQLRYTGEGHQDWKVLEPPLGARGGTLELRPRSRYRLQLRARLNGPTYQGPWSSWSDPTRVETATETAWISLVTALHLVLGLSAVLGLLLLRWQFPAHYRRLRHALWPSLPDLHRVLGQYLRDTAALSPPKATVSDTCEEVEPSLLEILPKSSERTPLPLCSSQAQMDYRRLQPSCLGTMPLSVCPPMAESGSCCTTHIANHSYLPLSYWQQP

SEQ ID NO: 16789 - protein, 281 aa, Homo Sapiens [sequence omitted]

SEQ ID NO: 16790 - protein, 468 aa, Homo Sapiens; identical to SEQ ID NO: 16514

SEQ ID NO: 16791 - protein, 440 aa, Homo Sapiens; identical to SEQ ID NO: 16515

SEQ ID NO: 16792 - protein, 317 aa, Homo Sapiens; identical to SEQ ID NO: 13609

SEQ ID NO: 16793 - protein, 249 aa, Homo Sapiens; identical to SEQ ID NO: 13611

SEQ ID NO: 16794 - protein, 114 aa, Homo Sapiens; identical to SEQ ID NO: 14356

SEQ ID NO: 16795 - protein, 114 aa, Homo Sapiens; identical to SEQ ID NO: 14357

SEQ ID NO: 16796 - protein, 594 aa, Trichoplusia ni; identical to SEQ ID NO: 14487

SEQ ID NO: 16797 - DNA, 2488 bp, Ctenoplusia agnata
ccctagaagcccaatctacgtcattctgacgtgtatgtcgccgaaaatactctgtctctttctcctgcacgatcggattgccgcgaacgctcgattcaacccagttggcgccgagatctattggaggactgcggcgttgattcggtaagtcccgccattttgtcatagtaacagtattgcacgtcagcttgacgtatatttgggctttgtgttatttttgtaaattttcaacgttagtttattattgcatctttttgttacattactggtttatttgcatgtattactcaaatattatttttattttagcgtagaaaatacaatggcgtctcgtcaacatttataccaggatgaaatagcagcaatactggaaaatgaagatgattattctcctcacgataccgactctgaaatggaagattgtgttacccaagatgatgtcaggagtgacgttgaagacgagatggtggataatattggcaatggtacgagtccagcaagtaggcacgaggatcctgagacccctgacccgtcatcagaagcttctaatcttgaggtaactttatcttcacacagaattattatattacctcagcgttcgattcgtgaaaagaataatcacatttggtctacaacaaaaggtcagtcttctggtaggactgctgctataaatattgtacgtaccaatagaggacctactcgaatgtgtagaaacattgtcgatccattactctgctttcaactttttataaaagaagagattgttgaggaaattgtcaagtggacaaacgtggaaatggtacaaaaacgtgtaaacctgaaggacatctcagcaagttatagggataccaatgaaatggaaatctgggctattataagtatgctcaccttatcggccgttatgaaagacaatcatctgtctactgacgagttgttcaatgtctcctatggcactcgatacgtttcagtaatgagtcgagagagatttgaatttctattgcgattattgagaatgggtgataaattactgagaccaaatttacgccaagaggatgctttcacacctgtgagaaaaatatgggagatttttatcaaccaatgtagactgaattacgtacctggcactaacttgactgtcgatgaacagttgttaggttttcgcggccgttgtcctttccggatgtatattccgaacaaaccggacaaatatggtattaaatttcctatggtatgtgatgctgctacaaagtacatggtagatgctatcccttatctaggcaaaagcactaagacacaaggtctgccattaggcgagttttatgtgaaggagctgactcaaacagtacacggaacaaacagaaatgtcacttgtgacaactggttcacgtctgttccattagctaagagtttgctaaacagtccatataatttaacgctagtgggaaccatcaggtcaaacaagagggagataccagaagaagtcaagaactcacgttcgcggcaggtaggttcgtcaatgttttgttttgatggccctctgacattagtttcctataaacccaagccgtcaaagatggtattcttattatcatcatgtaatgaagatgccgtggtcaatcaaagtaatgggaagccggatatgatattattttacaatcagaccaaaggaggtgttgattcatttgaccagatgtgttcatctatgtcgacaaataggaagactaataggtggcctatggcagtcttttacggcatgttgaatatggcatttgtcaattcctacattatatactgccataacatgttggctaaaaaagaaaaacctctaagtcgcaaagattttatgaaaaaattaagcacagacttgacaacaccgtcgatgcaaaaacgtctggaggctcctactttgaagcggtccttacgtgataacataacaaatgttttaaaaattgtaccacaggcagccatagatacttcatttgatgaaccagagccgaagaaaaggcgctattgtggattttgctcatataaaaaaaagagaatgacaaagacacagtgcttcaagtgcaaaaaaccagtatgtggagagcacaatattgatgtttgtcaagactgcatataaagactgttttttttgtatttgcattatatattatattctaaagttgatttaattctaagaaaaacattaaaataagtttctttttgtaaaatttaattaattataagaaaaagtttaagttgatctcattttttataaaaatttgcaatgtttccaaagttattattgtaaaagaataaataaaagtaaactgagttttaattgatgttttattatatcattatactatatattacttaaataaaacaataactgaatgtatttctaaaaggaatcactagaaaatatagtgatcaaaaatttacacgtcatttttgcgtatgattgggctttataggttctaaaaatatgattgggcctctaggg

SEQ ID NO: 16798 - protein, 591 aa, Anopheles gambiae
MGDAMHVQWLSEETEEVPENEEDMLYEDVEYIEEYVHFPDGPESNVSGSVAVQNEESTGHVIKIESIDHAFDMLQNSVWSIKPPERTGTMGRKVAHPRPAPVGLAKSAKSPAECLSLFLDADVIAMITEYTNEQIKAEQPNYARERDANPTDEMEIMALLGVLYIAGTVRDGRENIERLFDTKMGTGLEAVYLTMTSLRYHFLIRSIRFDDPTAAPDEIEGDKLAPIRPIYERIVSNCQKYLRPGRFLMLDEQAVQFKGKCEFRQILPSAPGRAGFRFHLLVDCETSYVSNLEICVPENQNPYNLSYAPTDVAMRLTEPVQGRQKTVILGAGLTSIDLIEKLYASRTMAMGEVPKSYPDLPKALIANKGRPEHSTLAAYHDPATLVSYVTRRKEVMLLMSSFVDFDSEEQAGEQDEGEQHLKLVELYNRTKTTIRTIQQMCAKHNVVRSTRRWPVAVFFNLMNLSAINAWCIYCLNHPEEAKMSRRDFLVTMALELLRPQARRRLDSKTLPRLLRQRIGLFLGISREEYETVPVVERQGGESRGRCYLCGRARNKTTRISCHSCGKYTCNAHCAQLCRTCYMDDCASEQQE

SEQ ID NO: 16799 - protein, 565 aa, Anopheles gambiae
MADNLNNIPNCFPNNEDSSSDSDHDAKSDESDMENNIEEVMQASIMEELDEDSQEQATGRCVNALEARSSWKPWAGKQKPFPFFRKKRLRVDLPAKSTPYEIFSLILDDKLVAHIALAMNLYMEKKNAQKSKASKWLETNPKEVRKFIGLMIWMDLVRVGRLEDYWSESALYNFAVPRAAMYRERFRALLGAFCFYDDGTSKTDYKEPGKIGAFIDVLQSKFQALLHLGEDVVVREMLALGRDRTSFKQYIPASAHRHGRWALFKLCSLEGYTWGLKLCTEQRLIGEAQLANSVCMELCEPLLNQGRTVYIDNFHASFDLAQALLANQTHLVGTVRVNGSSMPKDVLLAKLRKGEIIARENDDGVMVLKWKGTCTMGLLSTKHSPALVPMESQVRSNRRWIRVARIQPEAVIAHIQAKGRPDRSDAIGPHITDLRKGMKWYKQVGLVLLLQVCVTNAWILHRMVTKKKLKLATFREQLVDQLVPLPNPTVERGLSGGEKKYTHHLEVRTDGNGRTVRRSCANCYAESRKTMSHYEAGRNKKATTTFCGSCPKQPQLCMPCFNKLH

SEQ ID NO: 16800 - protein, 500 aa, Anopheles gambiae
MFPLPSNCDPVFTMAALGPYVVIEPLDSEYVVNDTGPAACAEATPNTDGGGEPEQQSDDDDLICLWEEPQTFGIFDEPVGTNVPFDGADERTASEYAALVCDDALFDILVKGTNRHRKQWADCMRAGGQSVEPYRKVTVAEMKRYVGLLLVMGQVRKDCQHCYWSTNPLLETPVFANTMSYKRFQQISHYFHGMKQANRTYDAKPVLDHLVPKFQALYAPKQQLIVSELTIPQDVLNGQQTEPPNHSEDAQGSTPESAKRLRLLCESDTGYVLNVELANQQLDQVALTDVSIVRPYFGRWHHVYWGNDGITVAAAETLYANQTLACGTLRNDPDGTVAPERKSPVLVMDGQGKRILSTIHGAAAMQPTEGEPQGPPPACVADLNRHLADLERFEGLLVEEYLSNASVGWHIRTVLLLINVALLNAYILFSQTDTGSRFTFNVFRLAVAREWVGASEPLEEPTKFLPLIRGRKRKFLPLIPGRKRKETGLHNRVPKHPARN

SEQ ID NO: 16801 - protein, 577 aa, Aphis gossypii
MTVEQIRSLLQDISTETDCVDDQESDSDLSIEDVEVSDHESNSEQDFSDNESDLETSLGDSTFYIGKDKITKWQLKEFTTSKIRQHNIVNVVPGPKECARNIVSEIDAFLKIIDLDMIDEIVTCTNMYISNMRQRVQYSRPRDCLDTSRCEILAYFGLLFLIGIKKAHHANVKELWSADGSGTEITRATMSYKRFLFLCRCLRFDDRGTRAERRVIDKLSPIRTTFDLFLKNINKNYNLSEYTTIDEMLHPFRGRCQWIQYIPSKPAKYGIKMFALCDAKTFYTSKIEIYVGKQPPGPYEVSNSPIDIVKRLVTPIENSKRNLTTDNWYTSIPLADYLLQKKITLTGTLKKNKREIPTEFLPHKKKEVGSSVFGFQKNKTLVSYVPRKNKAVILLSTMHHDSKIDVETRKPEIIIDYNCTKGGVDTVDKMCAAYSVSRITKRWPLVIFYSLMNIAGINAQVLFSYSKHNNAPKIRRLFLKTLAFDLMKEHLAFRAQISSLPSDISSFLKIKYAVPSTSDVSTTPPSKRGTCFECGRKKNAATSMKCTKCMRFVCKLHSKKIIICEKCSNNDDNGNSE

SEQ ID NO: 16802 - DNA, 2634 bp, Aphis gossypii
ccttccagcgggcgcgctgttgtaaataatacaacagttttatatttattggtttattcaatttttattctatttttatcttatcggcggtcatgggtattcctctataatgttattatctacgttttagactatttttgaagtgtttcagttcattgtattgcagacaatcgacgaagtacttatagtgttgtcacaaaatacaacacgcgccattccgtgtacctacgccaaacacaaaacgcgtgttcggtgtacgcatcgttcgtcgtatctgacttattattttgtaatttttatttttgtgtggtaataaaaacaaaaatatgtaagtattgttttatatcactatgcaatatataatatatacattttaatttttcttacaatatgttttttttattatttgtatacgccaaacacaaaacgcgtgttcggtgtacgcatcgttcgtcgtatctgacttattattttgtaatttttatttttgtgtggtaataaaaacaaaaatatgtaagtattgttttatatcactatgcaatatataatatatacattttaatttttcttacaatatgttttttttattatttgtatacgtttttggtacgtactaataatcgatattatttatacaatgtcttaggtcggatcatatgacagttgaacaaattcgaagtttactgcaagacatttcaactgaaacagattgtgttgatgaccaggagagtgatagtgatctaagtatcgaagatgtggaggtaagtgaccacgaaagcaattctgaacaagatttttcagacaatgaatcagatctagagactagtttgggggacagtacattctacataggaaaagataaaataactaaatggcaactaaaagagtttacaacttcaaaaattaggcaacataatatagtaaacgtagttcctggtccaaaggagtgcgctagaaatattgttagtgagatagatgcatttctaaaaataattgatcttgacatgattgacgaaatcgtaacgtgcactaacatgtatattagtaatatgagacaacgagttcaatactctagaccccgagactgcttagatacttcaaggtgtgaaatactggcttattttggacttttatttttgattggtataaagaaagctcatcatgctaatgtaaaagaattatggtcggcggatggttctggtacagaaataactagggccactatgagctacaaaagatttttgtttttatgtcgctgcctcagatttgacgatcgcggaactagagctgaaagacgggtgattgataaactgtctcctattcgtactacgtttgacctttttttgaaaaatatcaataagaattataatttgagtgaatatactactattgacgaaatgttacacccatttcgtggtcggtgtcaatggatacagtatatcccaagtaaaccggccaaatatggcatcaaaatgtttgcattatgtgatgcaaaaacattttacacgagtaaaatagagatttatgttggaaaacaaccacctggtccgtatgaggtttctaattcaccaattgatatcgtaaaacgattagtaacacccatcgaaaactctaaacgaaatcttaccactgacaactggtataccagtattccacttgcagattacttattacaaaaaaaaattactctaactggaactttgaaaaaaaacaagcgagaaatacctacagaatttttaccacataaaaaaaaagaagttggttcgagcgtgttcgggtttcaaaaaaataaaacgttagtgtcatacgtacctcgaaaaaacaaggcagttattttgctttcaactatgcaccatgattcaaaaattgatgtagaaactcgtaaaccagaaataattatagattataattgtaccaaaggtggagttgatacagtagataaaatgtgcgcggcatattctgtctctagaattacaaaaaggtggccacttgtaattttttattctttgatgaatattgctggaataaatgctcaggtactgttttcatactctaaacataacaatgcccctaaaattagaagattatttttgaaaacattggcatttgatctaatgaaggaacatcttgcttttcgagctcaaatctcaagtttaccatcggacatatcatcttttttgaaaataaaatatgctgttccaagtacatcagatgtatctacaacccccccttcaaaacgaggaacttgcttcgaatgcgggagaaaaaaaaatgcggctacatctatgaagtgcaccaagtgtatgcgatttgtatgtaagctacattcaaaaaaaattattatttgtgaaaagtgttctaataacgatgacaatggcaattctgaataatttcttactgtaaacaaatactaaaaataattttaatttttgatgtaataataataagacgtattgattttttaataaaacataattataatagtatttaaataaaaacaactttgtgaacgtacctattgtttattttattattagatataatatgtacgactatcacagcatattaggactgttgtaaaatttacaacgcgcgactactcttgtttcaaataatggcgcgcccgctggaagg

SEQ ID NO: 16803 - protein, 545 aa, Acyrthosiphon pisum
MISDEDILLHLDEIIANEDEFIDDINFDIENNDIEVTELEVTDPPSPDHSPIVQRNFRPKEHYFDSSKCGVQKHEFGLNSNSSKLEFFKAFVSEFLLGKVAFETNRYAKQYIQSNEISHQSRVNAWKDTNVDEMYTFLATTILMSRNKKLDMKDYWSTDPLLSSPIFRQIISRNRYLLLHQMLHFCNNENQEKGNRLFKLDVVLDEIRTNFKAGMVPFQNIVIDESLVLWKGRLSFKQFIKTKRHRFGIKFFVLCDVETDFILDFIIYTGTETRLLPYDANIGISGAVVKTLIAPYLNKGYNLYTDNWYTSPILAQYLYKKKTTITGTVRKNRRGMPELKNKLAVGDVQSAHSKNIMVLKWVDRREVFMLSTKFDSNLDNSGKFDRKGNLVKKPICVINYNQCMGSIDKTDMLLSSVECVRKTSKCILNAFSAFKTVTGQNMPLANFQLEVIRQLLEKYGGNTVSPRGRPCTKDQPFRLSARHFPSDVKKLASGKVQRRKCIVCTRNNKRKDTMYMCQECDVGLCATPCFAIYHTKQNYLAVQLF

SEQ ID NO: 16804 - DNA, 2476 bp, Agrotis ipsilon
ccctagaagcccaatctacgtaaatttgacgtataccgcggcgaaatatatctgtctctttcacgtttaccgtcggattcccgctaacttcggaaccaactcagtagccattgagaactcccaggacacagttgcgtcatctcggtaagtgccgccattttgttgtaatagacaggttgcacgtcattttgacgtataattgggctttgtgtaacttttgaaattatttataatttttattgatgtgatttatttgagttaatcgtattgtttcgttacatttttcatatgatattaatattttcagattgaatataaaatggagtcccgtcaacggctaaaccaggacgaaatagctacaattttagaaaatgatgacgattattctccactggattcggactccgaggcagaagatcgtgtagttgaagatgatgtctggagtgataacgaggacgcgatgatcgactacgttgaagatacaagcaggcaagaggaccccgataacaatattgcttctcaggaatcggctaatcttgaggtaacttcgttgacttcacaccgaataattagtttgcctcagcggtcaatatgtggaaaaaacaaccatgtatggtcaactacaaagggacgtacgacgggcaggacttctgctatcaatataatacgcacaaataggggaccaacgcgaatgtgtcgcaatattgttgatccattgctttgttttcaactttttataacggatgagataattcatgaaatagttaagtggacaaacgtcgagatgatagtaaaacgtcaaaatttgatagacatttcagcaagctacagggatacaaatacaatggagatgtgggcgttagtcggcattctcactctgacggcagttatgaaagataaccacttatcaactgatgagttgtttgacgctacattctctggcaccagatacgtatcagtaatgagccgagagagattcgaattcctaataagatgtatgagaatggacgacaaaacactgcgaccaactcttcgtagcgatgatgcttttataccggtgagaaaactatgggagatttttatcaatcaatgcagactaaactacgttcctggcggtaacttgactgtagatgagcaattgttgggttttcgcggccgttgtccattccggatgtatattcccaacaaacctgataaatatggcataagattccccatgatgtgtgacgctgccacaaagtacatgatagatgccataccgtaccttggtaaaagtacaaaaacaaatggtttaccactgggcgagttttatgtaaaagagctgactaaaacagtacacggcacaaatagaaatgttacctgcgacaactggttcacgtctatcccattagcgaagaacatgctccaggctccatacaacctaacaatagtaggaaccatcaggtctaacaaaagagaaatacctgaagagatcaagaattctcgatcacggccggtaggatcctcaatgttttgctttgatggccctttgaccttggtttcgtataaaccaaagccgtcaagaatggtatttttattgtcttcctgtgatgaaaatgccgttatcaatgaaagtaacggaaaaccggacatgatattgttttataatcaaacaaaaggcggtgttgattcctttgaccagatgtgtaagtctatgtctgctaacaggaaaactaataggtggccgatggcggtcttttatggcatgttgaatatggcgtttgtgaattcctatataatatactgtcacaataagataaataaacaaaaaaaaccgataaaccgcaaagaatttatgaaaaatttaagtacagatctgacgacaccttggatgcaagaacgactaaaagcacctactttgaagaggactctacgcgacaatataacaaatgttttaaaaaatgtggtaccgccatctccggctaataatagtgaggagccaggaccaaagaaacgaagctattgtggattttgttcatataaaaaaaggcggatgaccaagacgcagttttacaaatgcaaaaaggctatatgtggagaacacaatattgacgtttgtcaagactgtgtataaagactgttttttttaaaaggcttataaagtattactattgcgtgatttaattttataaaaatatttaaaaccagttgatttttttaataattacctaattttaagaaaaaatgttagaagcttgatatttttgttgatttttttctaagatttgattaaaaggccataattgtattaataaagagtatttttaacttcaaatttattttatttattaattaaaacttcaattatgataatacatgcaaaaatatagttcatcaacagaaaaatataggaaaactctaatagttttatttttacacgtcatttttacgtatgattgggctttatagctagtcaaatatgattgggcttctaggg

SEQ ID NO: 16805 - protein, 505 aa, Chilo suppressalis
MIQGQIMVSDTEEEPSDSTGRTKRRRTYAWRKRDLAKNPVNWPDVQGACQDKRPIEWFENFLDEDVISLLVSESNKYAVKKNLPGDITTEDMKCFIGILLVSGYSWLPRRRMYWENSPDTKNELISSAMTRDRFDFIFRHLHVNDNLDLQDKYTKVRPLVTLLNKKFLEFSPLEEHYSVDEAMIPYYDRHGCKQHIKGKPIRYGFKAWVGATRLGYVLWMEPYQGATTMCNPIYKELGLGASVVLTFCDVLISRGFDLPYHVVFDNFFTGTPLLEEITKKGLRCTGTVRENRTSSCPLITSKLLKKKERGAVDYRTTHDNTFIIAKWHDNNIFSIASNAVGINPKQSAKRFSQSEKRNIVIEEPHMVSIYNKYMGGVDRSDENISHYRIGIRGKKWYMPLLTHMIDLAEHNAWQLYKINHGKLDHLGFRRRVAIALIESNRKNAKRGPSRPSHHEHADSRKDQMNHLVIPQSKQTHCRQCHKKCLTRCKKCDVGVCVKCFETYHS

SEQ ID NO: 16806 - DNA, 2406 bp, Chilo suppressalis
cccagattagcctactgtcctatatttaggacagtagaaataaaaaaaaatatcagaataccctctttatctaagattatttagtcttatgatttgcagtaagaaacgtgtcagctttattagaaaaaataaaaagacagttattttaacagtttttaccttataagtgtgtaataaaagtgcgttgcagacatggcaaatgacaggtatgtataaaaagttatattttactcgtgagttgtttttttctgtgttaatatctagttgataaccttaacttttgtactaaataaatattctagcaaaataatataaataaattacgtataacttgttacaaatactagcgtactatatataggacagtaggataatatacatgattttagtacaataatacaactttttctttacagaccgttagctgcgcatgaaattttagatgctttagaaaatgtttctgataatgaagaagattatagagaacgactgatatgtattctacctcctcctgttgatcctgcctgtctcactgacgaagattcgggtgaataagataatgtaactttgaataatttgccacgaaacattctgcttcaaccggctgaagtaatgattcaagggcagattatggtgagtgatacagaagaagaaccttctgattctacaggtcgaactaaacgtaggcgtacctacgcatggagaaaacgggacttggcaaaaaatcccgtgaattggccagatgttcaaggcgcttgccaagataagcgcccaattgagtggtttgaaaacttcttagatgaagatgttatttcgttgttggtgtcagagagcaataaatatgctgtcaaaaagaatttgcctggagacataaccactgaagatatgaaatgtttcatcggcatattgttggttagtggttattcatggctcccccgtagaagaatgtattgggaaaactcccctgatacaaagaatgaattgatcagctcggctatgactagggatagatttgactttatttttcgccaccttcatgtcaatgataatctggatttgcaagacaaatacacaaaagtacgccccctagttacacttctaaataaaaagttcttagagttttctcctcttgaagagcattacagtgtagatgaggccatgatcccctactatgatagacatggctgcaaacagcacataaaaggtaaacctattaggtacgggttcaaagcttgggttggtgctacacggttagggtatgttttatggatggaaccataccaaggtgctacaactatgtgcaatccaatatataaagaattggggctgggtgcaagcgttgttctcactttttgcgatgtgctgatttcacgtggcttcgaccttccttaccacgtagtttttgataatttttttactgggacgcccttgctggaagagataacaaagaaaggccttcgttgcactgggacagttcgagaaaacaggacatctagttgtcctctgattacatcgaagttactgaaaaaaaaggaacgtggtgctgtcgattacagaacgacacatgacaacacgttcattattgctaaatggcatgacaataatatattcagtattgcttctaatgctgtaggaataaatcctaaacaatctgccaaacgcttctcacaaagtgaaaagagaaacattgtcatagaagaaccacatatggtgtccatctataacaaatatatgggaggagtggatcggtctgatgaaaatatttcacattaccgaattggtatacgaggtaagaaatggtacatgccgttgctcacacacatgattgatcttgccgaacataatgcatggcagttatataaaataaatcatggaaaactggatcatcttggctttcgcagaagggtagcaattgctttgattgaatcaaacagaaaaaatgccaaaagagggcctagccgaccctcccatcatgaacatgctgatagtcgtaaagaccaaatgaatcatctggttattcctcaatcgaagcaaacacactgtcgtcaatgtcacaaaaaatgtttgacacgttgcaagaaatgtgatgttggagtgtgtgtcaagtgttttgaaacatatcattcataaatagtgttaatctagtaaattacatataacaatgggtaatataatcaatagttatctaataaactacactttttgattacattctgttttgtcataaatggtcttttatttcctcttattatcctactgtcctacatataggacggctgtttccctgaaagccttacacttaatttttttttcataattttttttatgttgcataagatctaataaactaaataatgtaacttttttgaaaattttcagaaaattttagtttcaggcttatctggg

SEQ ID NO: 16807 - protein, 622 aa, Drosophila melanogaster
MSSSGRKRKQQLKPRQDDHRSPVKRRSVDIKSEPLDGYPALADYDLSTADIKPDLTELQLQLVAEQQAASNTIRLELEQQESDSDEDGYSELDYQAEDVFCQDDMDDYDPDWSSQQTGSRLLFKFPIQQSGLKFGQRFQGPQHYFNQVLGNRSKFFSSLAQSCNLKGGELKSNPTTAEEMEIFMALSLLMCDLKLEHLSDYWSTNMFYGLVGFSGKIPLERYQQLLHCLNFDAPQLQAGRAKVKNSLLLDFINERMEEIYICGQQLVLNEPITLWKGALRYQDELPNKFRTNALLLHMLTEQSGLVVKILPEIVRKEDAPAWVRNSRQLVEHRNKIVLKLMEGYHGGRTVYTSKFYGSYGLAQELAKKSTYCTGLLDRNRYGNSKALVHQRLDSNSISTSYATSLMMAKWRRRAKSLYCFSSDCLAIYSKEMAMQKTNAKPKLIQELEFQLRPGNDGRHHLIHYQAACKELKANIKLTIFLLNILVYNAYLLYFANGQNARVGHLKSYSEFRVIIIKSLLREEVTNEPVTSIQKPETYERSKNKPVPEPRLKTILHEPMLIQQNGKPAKKNCRYCHKGGMLQFSRYMCNTCPDKPGLCQEPCFLLWHEQLKKVIRQTIGRSE

SEQ ID NO: 16808 - protein, 581 aa, Heliotis virescens
MSKMASKRLSNTQIVDVLEDDEECIIDSPDEDEVDAEVIQSDHNSESQESANEIDSEWSDTDNEPLSRLASEDSDNFYFSKNKCTKWAKEPPRTSVRVRRHNIMRETPGPKGRAKEIQTISEAFFCMFSMDTVNLVLQQTNDYIKSIQEKFQRERDCKVLEYEELLAYLGLLYMSGVLRSSHLNFKDLWATDGTGIEFFQNTMSFNRFLFISRCVRFDDKNTKSERLKTDKLAAVREFTDLMNNNFINNYCASENVTLDEQLPAFRGRFSGVVYMPNKPTKYGIKHYALVDSATFYLLKFEIYAGVQPEGPYRMPNDTVSLVKRMTEPIWGTGRNVTMDNWFTSVPLANILLKDHQLTMVGTIRKNKPEIPTCFQPKRTRTEHSSLFGFQEDVTLCSYVPKKSKAVLLISSMHNDNNIVESEKKKPEIILYYNSTKGGVDTNDQMCANYNVGRRTKRWPMVIFYHLLNVAGINAYVIFKNKIDHGISRREFLKHLAVDLVKVHQQTRSNIPQLPRAVQKRLKRNAEVQDPGSTSRGGPSTSYKRCHICPRSKDKKIRFMCAKCHHHICHDHSTMICDKCID

SEQ ID NO: 16809 - protein, 594 aa, Macdunnoughia crassisigna
MGSSINDEHILSALLQSDDELVGEDSDSEISDHVSEDDVQSDTEEAFIDEVHEVQPTSSGSEILDEQNVIEQPGSSLASNRTLTLPQRTIRGKNKHCWSTSKSTRRSRVSALNIVRSQRGPTRMCRNIYDPLLCFKLFFTDEIISEIVKWTNAEISLKRRESMTGATFRDTNEDEIYAFFGILVMTAVRKDNHMSTDDLFDRSLSMVYVSVMSRDRFDFLIRCLRMDDKSIRPTLRENDVFTPVRKIWDLFIHQCIQNYTPGAHLTIDEQLLGFRGRCPFRMYIPNKPSKYGIKILMMCDSGTKYMINGMPYLGRGTQTNGVPLGEYYVKELSKPVHGSCRNITCDNWFTSIPLAKNLLQEPYKLTIVGTVRSNKREIPEVLKNSRSRPVGTSMFCFDGPLTLVSYKPKPAKMVYLLSSCDEDASINESTGKPQMVMYYNQTKGGVDTLDQMCSVMTCSRKTNRWPMALLYGMINIACINSFIIYSHNVSSKGEKVQSRKNFMRNLYMSLTSSFMRKRLEAPTLKRYLRDNISNILPNEVPGTSDDSTEEPVTKKRTYCTYCPSKIRRKANASCKKCKKVICREHNIDMCQSCF

SEQ ID NO: 16810 - DNA, 2472 bp, Macdunnoughia crassisigna
ccctagaaagatagtctgcgtaaaattgacgcatgcattcttgaaatattgctctctctttctaaatagcgcgaatccgtcgctgtgcgtttaggacatctcagtcgccgcttggagctcccgtgaggcgtgctcgtcaatgcggtaagtgtcactgattttgaactataacgaccgcgtgagtcaaaatgacgcatgattatcttttacgtgacttttaagatttaactcatacgataattatattgttatttcatgttctacttacgtgataacttattatatatatattttcttgttatagatatcgtgactaatatataataaaatgggtagttctataaacgatgagcatatcctctctgctcttctgcaaagcgatgacgagcttgttggtgaggattctgacagtgaaatatcagatcacgtaagtgaagatgacgtccagagcgatacagaagaagcgtttatagatgaggtacatgaagtgcagccaacgtcaagcggtagtgaaatattagacgaacaaaatgttattgaacaaccaggttcttcattggcttctaacagaaccttgaccttgccacagaggactattagaggtaagaataaacattgttggtcaacttcaaagtccacgaggcgtagccgagtctctgcactgaacattgtcagatctcaaagaggtccgacgcgtatgtgccgcaatatatatgacccacttttatgcttcaaactattttttactgatgagataatttcggaaattgtaaaatggacaaatgctgagatatcattgaaacgtcgggaatctatgacgggtgctacatttcgtgacacgaatgaagatgaaatctatgctttctttggtattctggtaatgacagcagtgagaaaagataaccacatgtccacagatgacctctttgatcgatctttgtcaatggtgtacgtctctgtaatgagtcgtgatcgttttgattttttgatacgatgtcttagaatggatgacaaaagtatacggcccacacttcgagaaaacgatgtatttactcctgttagaaaaatatgggatctctttatccatcagtgcatacaaaattacactccaggggctcatttgaccatagatgaacagttacttggttttagaggacggtgtccgtttaggatgtatatcccaaacaagccaagtaagtatggaataaaaatcctcatgatgtgtgacagtggtacaaagtatatgataaatggaatgccttatttgggaagaggaacacagaccaacggagtaccactcggtgaatactacgtgaaggagttatcaaagcctgtgcacggtagttgtcgtaatattacgtgtgacaattggttcacctcaatccctttggcaaaaaacttactacaagaaccgtataagttaaccattgtgggaaccgtgcgatcaaacaaacgcgagataccggaagtactgaaaaacagtcgctccaggccagtgggaacatcgatgttttgttttgacggaccccttactctcgtctcatataaaccgaagccagctaagatggtatacttattatcatcttgtgatgaggatgcttctatcaacgaaagtaccggtaaaccgcaaatggttatgtattataatcaaactaaaggcggagtggacacgctagaccaaatgtgttctgtgatgacctgcagtaggaagacgaataggtggcctatggcattattgtacggaatgataaacattgcctgcataaattcttttattatatacagccataatgtcagtagcaagggagaaaaggttcaaagtcgcaaaaattttatgagaaacctttacatgagcctgacgtcatcgtttatgcgtaagcgtttagaagctcctactttgaagagatatttgcgcgataatatctctaatattttgccaaatgaagtgcctggtacatcagatgacagtactgaagagccagtaacgaaaaaacgtacttactgtacttactgcccctctaaaataaggcgaaaggcaaatgcatcgtgcaaaaaatgcaaaaaagttatttgtcgagagcataatattgatatgtgccaaagttgtttctgactgactaataagtataatttgtttctattatgtataagttaagctaattacttattttataatacaacatgactgtttttaaagtacaaaataagtttatttttgtaaaagagagaatgtttaaaagttttgttactttatagaagaaattttgagtttttgtttttttttaataaataaataaacataaataaatggtttgttgaatttattattagtatgtaagtgtaaatataataaaacttaatatctattcaaattaataaataaacctcgatatacagaccgataaaacacatgcgtcaattttacgcatgattatctttaacgtacgtcacaatatgattatctttctaggg

SEQ ID NO: 16811 - DNA, 2464 bp, Pectinophora gossypiella
ccctagataactaaacattcgtccgctcgacgacgcgctatgccgcgaaattgaagtttacctattattccgcgtcccccgcccccgccgctttttctagcttcctgatttgcaaaatagtgcatcgcgtgacacgctcgaggtcacacgacaattaggtcgaaagttacaggaatttcgtcgtccgctcgacgaaagtttagtaattacgtaagtttggcaaaggtaagtgaatgaagtatttttttataattattttttaattctttatagtgataacgtaaggtttatttaaatttattacttttatagttatttagccaattgttataaattccttgttattgctgaaaaatttgcctgttttagtcaaaatttattaacttttcgatcgttttttagatggatttgagaaaacaagatgagaaaatacgtcaatggcttgagcaagatattgaggaggacagtaagggagagtcagacaattcaagttcggaaacggaagatattgtggagatggaagttcacaaaaatacgagcagcgaatctgaagtttccagcgagtccgattacgaacccgtttgcccaagtaagagacagagaacgcaaattattgaatcagaggaatctgataactccgaaagtattcgcccaagcagaagacagacaagtcgggttattgattcggacgaaactgatgaggatgtaatgagctccactcctcagaatatccctcgtaatccgaatgttattcagccaagttccagattcctttatggtaaaaataaacacaaatggtcgtcagcagccaaaccatcttctgtgcgaacttctagaagaaacatcatacattttataccaggaccaaaagaaagagcaagggaagtttctgaaccaattgatatattttccctgtttataagcgaagatatgttgcaacaagtcgtgacatttactaatgcagagatgcttattagaaaaaataagtataaaaccgagacgtttactgtatctcctaccaatttggaagaaataagagctttgcttggtttattgttcaatgcagcagctatgaaaagtaatcatttaccaactcgcatgcttttcaatactcatcgatcaggaacgattttcaaagcttgtatgagcgcagaacgattaaattttcttatcaaatgcctccgatttgatgacaagcttacaagaaatgtaagacagcgagatgataggtttgcacctatacgtgacttgtggcaagcattgatatctaactttcagaaatggtacactccagggtcctatattaccgtagacgaacagctggtcggatttcgaggaagatgttcatttaggatgtatattccaaacaagcctaataaatacggaataaaacttgttatggctgcagatgtaaacagcaaatatatagtgaatgccattccgtacttgggaaaaggaactgatcctcaaaatcaaccgttggctacgttttttataaaagaaataacgtctacattacatggcacgaatcgaaacataaccatggacaactggttcacgtctgttcccttagctaacgagctgttgatggcaccttataatttgacattagtgggaactctaagaagtaataaacgagaaattcctgaaaaactcaaaaattctaagtcacgcgcaattggtacttcgatgttttgttacgatggtgataagacattagtttcatacaaagccaaatctaataaagttgttttcatcttgtctacaattcatgatcaacctgacatcaatcaagaaacaggaaaaccagaaatgattcatttctacaacagtacaaagggtgcagtagataccgtggaccaaatgtgctccagcatttccaccaacagaaaaacccaaagatggcctttgtgcgtgttttataacatgttgaatctatcgattatcaatgcgtacgttgtatacgtttataataatgttagaaataataaaaaacctatgtctcggcgtgacttcgttataaaactaggagaccaacttatggagccctggctgcggcagcggttgcagacggtgactttgagacgtgatatcaaggtcatgatacaagatatcttaggggagtcttctgatctagaagcccctgttccttctgtgtctaatgtgcgtaaaatctactacctatgtccttccaaagcccgaagaatgacaaaacaccgatgcattaaatgcaaacaggctatttgcgggccccataatattgacatatgtagtcgctgtattgaatagtttcactaagtaattttgttcctatttagtagataagtaacacataattattgtgatattcaaaacttaagaggtttaataaataataataaaaaaaaaatggtttttatttcgtagtctgctcgacgaatgtttagttattacgtaaccgtgaatatagtttagtagtctaggg

SEQ ID NO: 16812 - protein, 449 aa, Tribolium castaneum
MDIFRLVDLAAAYDGTATGFEIDVWRPTMNTTNVYPVHAIKMAENDNYVGLSKEEVSALKELITTAESEEDSDIETELENVNDCWSTDPLLHTPIFSKVMPRDRYLLLLRLLHFCDNTKQKKGERTFKIDLVMSFLSNRFKVLFTPFENLCIDESLVLWKERLSFKQYIKSKRHRFGVKMFVLCNVETDYILGFIVYTGSQTKIKPSDLGISGSVVLTLLEDYLDKGHNLYIDNWHSSPELALHLYQHKTNVCGTVRTNRRHMPKLPDPKVKGDIESQHTAEMMTGKVDRTSKEEVKKPTCIVDYNANMGSVDKVDMLLSSVECLRKTIKWYKKIFFHLVDLCMINAHAMYKLEVIRQIVKKYAKIQKTSKKGRPSSGDNPLRLIGRHFPQKIPPVPGGKKTCQRICFVCKHTQRGVSRRRDTSYQCAECDKALCLIPCFEVYHTKQIF

SEQ ID NO: 16813 - protein, 487 aa, Daphnia pulicaria
MQKKADAKKVAQHKAANRNWKECKVWGDVGRQSRADDDSPRPQFQERAIQFAPLEEPGPVLSQFNRFSNPLGVFKSMLGGEDTLYLLREATNDYIAEFWSSRKTPPSRKVGGKPEGRLIGPRLPAGGFVTDHELVAFFGIQFLIGYHRLPELSMFWEQQPDAGLGLGIIQQAMTRERFKFISKHIACASPWDDVDPNSDDPDQEPERPDPIRKIRPLVKRLNERYHACRKPPRGQSIDESMVKFKGRSVLRQTMKNKPIKSGFKIWSRCCHRGYTYKFEIYQGARFGEKQGRSRNNEAVERVVVDLCQPLTDQGFVVAFDRFFTSIALLDKLRENGVNAVGTILPSRVNQPIMTKNESNLRPDEFAAKFGGEPGTCRKGIFVWRDTKAFRVASNYHGSNLVKVRRKQRDGSFKTKSCPKAIDDYVNNMGGVDTANQLRSYYERDRKAKKWWHRLLYSLLETCLVNSWICFNDMVRSQMAEIKTSNTQ

SEQ ID NO: 16814 - protein, 585 aa, Homo Sapiens
MSNPRKRSIPMRDSNTGLEQLLAEDSFDESDFSEIDDSDNFSDSALEADKIRPLSHLESDGKSSTSSDSGRSMKWSARAMIPRQRYDFTGTPGRKVDVSDITDPLQYFELFFTEELVSKITRETNAQAALLASKPPGPKGFSRMDKWKDTDNDELKVFFAVMLLQGIVQKPELEMFWSTRPLLDTPYLRQIMTGERFLLLFRCLHFVNNSSISAGQSKAQISLQKIKPVFDFLVNKFSTVYTPNRNIAVDESLMLFKGPLAMKQYLPTKRVRFGLKLYVLCESQSGYVWNALVHTGPGMNLKDSADGLKSSRIVLTLVNDLLGQGYCVFLDNFNISPMLFRELHQNRTDAVGTARLNRKQIPNDLKKRIAKGTTVARFCGELMALKWCDGKEVTMLSTFHNDTVIEVNNRNGKKTKRPRVIVDYNENMGAVDSADQMLTSYPSERKRHKVWYKKFFHHLLHITVLNSYILFKKDNPEHTMSHINFRLALIERMLEKHHKPGQQHLRGRPCSDDVTPLRLSGRHFPKSIPATSGKQNPTGRCKICCSQYDKDGKKIRKETRYFCAECDVPLCVVPCFEIYHTKKNY

SEQ ID NO: 16815 - protein, 409 aa, Mus musculus
MPPSASAVDFFQLFVPDNVLKNMVVQTNMYARKFQERFGSDGAWVEVTLAEMKAFLGYVISTSVSHCESVLSIWSGGFYSNRSLALVMSQARFEKILKYFHVVAFRSSQTTHGLYKVQPFLDSLQSGFDAAFRPSQTQVLHEPLIDEDPVFIATCTERELRKRKKRKFSLWVRQCSSTGFIIQIYVHLKEGGGPDGLDALKNKPQLHSMVARSLCRNAAGKNYIIFTGPSITSLNLFEEFEKQGIYCCGLLSSRKSDCTGLPPSMLTNPATPLARGQHQIRTKGNMSLICWYNKGHFRFLTNAYSPVQKGVIIKRRSGEIPCPLAVEAFAAHLSYICRYDDKYSKYFISHKPNKTWQQVFWFAISIAVNNAYILYKMSDAYHVKKYSRAQFGERLVRELLGLEDSSPAH

SEQ ID NO: 16816 - protein, 704 aa, Macaca fascicularis
MRPEAEGDSEGEESEYFPTEEEEEEEEDDEVEGVEADLSGDGTDYELKPLPKGRKRQKKVPVQEIDDDFFPSSGEEAEASPIGEGGGGGRKVGRYRDDGDEDYYKQRLSPKMPRTLSLHEITDLLETDDSIEASAIVIQPPENATAPVSDEESGDEEGGTINNLPGSLLHTAAYLIQDGSDAESDSDDPSYAPKDDSPDEVPSTSSVQQPPPSRRRKMTKIVCKWKKADLTVQPVAGRVTAPPNDFFTEMRTPTEILELFLDDEVIELIVKYSNLYADSKGVHLGLTSSEFKCFLGIIFLSGYVSVPRRRMFWEQRTDVHNVLVSAAMRRDRFETIFSNLHVADNADLDPVDKFSKLRPLISKLNERCMKFVPNETYFSFDEFMVHYFGRHGCKQFIRGKPIRFGYKFWCGATCLGYICWFQPYQGKNPNTKHEEYGVGASLVLQFSEALTEAHPGRYHFVSNNFFTSIALLDKLSSMGHQATGTVRKDHIDKVPLESDVALKKKERGTFDYRIDGKGNIVCRWNDNSVVTVASSGAGIHPLCLVSRYSQKLKKKIQVQQPNMIKVYNQFMGGVDRADENIDKYRASIRGKKWYSSPLLFCFELVLQNAWQLHKTYDEKPVDFLEFRRRVVCHYLETHGHPPEPGQKGRPQKRNIDSRYDGINHVIVKQGKQTRCAECHKNTAFRCEKCDVALHVKCSVEYHTE

SEQ ID NO: 16817 - DNA, 2511 bp, Macaca fascicularis
ttggcagatcaagcaaaactgtcttttgaaaggaaggagcaagctacttgtaataaaagaccagctagaaaagctccagcctcagtcacgcctccggccccaacacaaagtaaaaacaaaccaaacaagaaagccaaagttctgtccaaaaaagaggagcgtttgaaaaagcacatcaagaaactccagaagagggctttgcagttccaggggaaagtgggattgccaaaggcaaggagaccctgggagtcagacatgaggccagaggcagagggagactctgagggtgaagagtctgagtatttccccacagaggaggaggaggaggaggaggaagatgacgaggtggagggggtggaggcagacctctctggagacggtactgactatgagctgaagcctctgcccaagggccggaaacggcagaagaaagtcccagtgcaggagattgacgacgactttttcccaagttctggggaagaagctgaagcttctcctataggagaaggaggaggaggaggtcggaaagtaggaagataccgagatgatggagatgaagattattataagcagcggttaagtcccaagatgcctcgaacactaagtttacatgaaataactgaccttttagagacagatgacagcatagaagcaagtgctatagtgatacaaccacctgaaaatgctacagcacctgtttcagatgaggaatcaggagatgaagaaggtggaacaataaataatctgccaggttctttgttgcacacagctgcgtatcttattcaagatggctctgatgctgagtctgactcagatgatccctcatatgcacctaaagatgactctcctgatgaagttccatctacgtcttctgtgcagcaacctccaccatcaaggaggaggaaaatgacaaaaattgtttgcaaatggaaaaaagccgacctaactgtacaacccgtagcaggtagagttacagcaccaccaaacgatttcttcaccgaaatgagaactcccacagaaattcttgaactttttcttgatgacgaggtcattgaactcattgtcaagtactccaacttatatgctgacagtaaaggtgtacatcttggcttgactagctctgaattcaaatgttttctgggaattatttttctgagtggttatgtttcagttcctagaaggcgtatgttttgggaacaaagaacggatgtgcataatgtactggttagtgctgccatgagacgtgaccgatttgaaactatattttctaatttgcatgttgctgacaatgcagatttggatccagtggacaaattttccaaattgcgacctctcataagcaaactcaatgagagatgcatgaaatttgttccaaatgaaacatatttcagctttgatgaattcatggttcattattttggtcgtcatgggtgcaaacagtttattcggggaaagcccattcggtttggctataagttttggtgtggtgccacctgtctgggctacatttgctggtttcagccgtatcagggtaaaaacccaaatactaaacatgaggaatatggtgtcggtgcgtcacttgtccttcagtttagtgaggcacttacagaggcacaccctggacgataccattttgtatccaataactttttcaccagtattgcacttcttgataagctcagttcaatgggacatcaggcaacaggtacagtgagaaaggatcacattgacaaagttccattggaatcagatgtagctttaaagaaaaaagaaagaggcacatttgattatcgaattgatggcaaaggcaatattgtctgcagatggaatgataacagtgttgtcactgttgcctcatctggtgctggtatccatcccctgtgtcttgtcagtcgttattcccagaaattgaaaaagaagatccaagttcagcagccaaacatgatcaaagtgtataaccaattcatgggaggcgtagacagagctgatgaaaacattgataagtatcgggcctcaatccgtggaaagaaatggtattcaagccctcttttgttctgtttcgaattggtcttacaaaatgcttggcaattgcataaaacatatgatgagaaaccagtggattttctggagtttcgtcgacgtgtggtatgccattatctggagacccatggtcatcctccagaacctggccaaaaaggaagacctcagaagcgtaacattgactcccgttatgatggcataaatcatgtgatagtcaaacagggaaagcaaacgcggtgcgctgaatgtcataagaacaccgcttttcgatgtgaaaaatgtgatgttgccttacatgtgaagtgttccgttgaatatcacactgaatagcaggtgtcaccacctcctgagacaagaaacataattttatacattatgtacagtggttttgcctagtgttccaattttggaacgtcacataacaatggaacataataaattttttttatcttcaaaaaaaaaaaaaaaaaa

SEQ ID NO: 16818 - protein, 591 aa, Rattus norvegicus
  misc_feature (382)..(382): Xaa can be any naturally occurring amino acid
MSHTDLHGRWFVLCDESVDAVSYACPMRFLLVSESQCPFEGDDPARGGAHSKVRSPKLLKVLSALEEGESGSNREEIFIAPPNNASEDLTDEDSGEEDSDQNSAQLPGWVLRASVLFIVNETNRYARQKNITLDLTVQELKRDRFELIFSYLHFVDNSEPDESDSFAKGTLFTKDRGLDVGASMVVRFVDALQECGCLPCHIFLDKVFTSVKPMSILREKGVKATGTVCEYRTECCPLKDAKELRKMRKGSFDYRVDESQEIIVCRWSNSHVVNICSNAVGIEPARGVGRMDQNIAKYKVKIRGMKRYLSFIGYIIDAALNNAWQLHRVCCQDGHVDLHSFRSYVARVYLESNVDTSSPGRRSRWVETENRFNMIGHWIVHXDKRTQCALCHSQTNTCCEKCQKGVHTFSSYSDITRNTFRWPVRRDRDVGKETFTQAWGGGAGKTQSQLLSKVDDIKQSLDIIHTQRAPESLKIRDPVTRGRDCIEQRGLRMQVLVSHRQHSRVPSRRELEEAVALGLALSLTLMCAQQNEDPSNKIKQQKKTERKHRHVVATSIHILEPGQKAVSSVPETGPMIVSDLPCVATNVQTPR

SEQ ID NO: 16819 - protein, 581 aa, Ciona intestinalis
MAVKGVSADETIWSFLEAESEKDKGDAAYACSSDESDILMDEFNATSSKNVDAPNHCCLSSDDETTVHTSSKLQKLLNDRSKSKRTVQQTHLEELSAEDSMEDWVRIVTDYYPEDHNLRETVMESGMDGVTPLDYLAMFLSAEFWDLLVTETNRHAAQTLRKKKLKKGSNLRTWKDTTVAEMKAYFAILLSMGLCNTVDMQDYWSASWITVTSSISKIMSRVRFTLIRAMLHFCNDEESSSKNSQKHNRLFKVRQLIDVLVPKFSALYKPDKELAIHEMTVACNYKSEQRVRKKPIQWTDKVYALTEARTGYLLEWAIHAGSSRETEKGASIVRKLCTRYIGKHDIYINTANSYTNRNLAKEFVSQTNGSGGIPGELKTINEKNNPVCAKSAVRSSEIKAKSATQKGNKRSYNDMKKANSKKRYNYLSGVIPIFRQLNLFRHKTVKWSLRIFENLAQICVVNSYILYTSKTSDSSDKMDLKKYIEACVSGLLVDYNPHITEKWRPPQPGTVLSRILPPQYVHKIIKIDKKPQCVVCSDSRRKLGRRQTSFMCEKCNVALCVVPCFHRYHTLKNYRVCHLDM

SEQ ID NO: 16820 - protein, 589 aa, Artificial Sequence
  Synthetic Sequence
MAKRFYSAEEAAAHCMASSSEEFSGSDSEYVPPASESDSSTEESWCSSSTVSALEEPMEVDEDVDDLEDQEAGDRADAAAGGEPAWGPPCNFPPEIPPFTTVPGVKVDTSNFEPINFFQLFMTEAILQDMVLYTNVYAEQYLTQNPLTRYARAHAWHPTDIAEMKRFVGLTLAMGLIKANSLESYWDTTTVLSIPVFGATMSRNRYQLLLRFLHFNNNATAVPPDQPGHDRLHKLRPLIDSLSERFANVYTPCQNICIDESLLLFKGRLQFRQYIPSKRARYGIKFYKLCESSSGYTSYFLIYEGKDSKLDPPGCPPDLTVSGKIVWELISPLLGQGFHLYVDNFYSSIPLFTALYCLNTPACGTINRNRKGLPRALLDKKLNRGETYALRKNELLAIKFFDKKNVFMLTSIHDESVIREQRVGRPPKNKPLCSKEYSKYMGGVDRTDQLQHYYNATRKTRHWYKKVGIYLIQMALRNSYIVYKAAVPGPKLSYYKYQLQILPALLFGGVEEQTVPEMPPSDNVARLIGKHFIDTLPPTPGKQRPQKGCKVCRKRGIRRDTRYYCPKCPRNPGLCRKPCFEIYHTQLHY

SEQ ID NO: 16821 - DNA, 56 bp, Artificial Sequence
  Synthetic Sequence
taatacgactcactatagctggtacacggcagggtcagttttagagctagaaatag

SEQ ID NO: 16822 - DNA, 37 bp, Artificial Sequence
  Synthetic Sequence
taatacgactcactatagagaatcaaaatcggtgaat

SEQ ID NO: 16823 - DNA, 36 bp, Artificial Sequence
  Synthetic Sequence
taatacgactcactatagtgctagacatgaggtcta

SEQ ID NO: 16824 - DNA, 38 bp, Artificial Sequence
  Synthetic Sequence
taatacgactcactataggctggtacacggcagggtca

SEQ ID NO: 16825 - DNA, 56 bp, Artificial Sequence
  Synthetic Sequence
taatacgactcactatagagaatcaaaatcggtgaatgttttagagctagaaatag

SEQ ID NO: 16826 - DNA, 55 bp, Artificial Sequence
  Synthetic Sequence
taatacgactcactataggatttagagtctctcagcgttttagagctagaaatag

SEQ ID NO: 16827 - DNA, 55 bp, Artificial Sequence
  Synthetic Sequence
taatacgactcactatagtgctagacatgaggtctagttttagagctagaaatag

SEQ ID NO: 16828 - DNA, 56 bp, Artificial Sequence
  Synthetic Sequence
taatacgactcactatagacaccttcttccccagcccgttttagagctagaaatag

SEQ ID NO: 16829 - DNA, 57 bp, Artificial Sequence
  Synthetic Sequence
taatacgactcactatagtggaataatgctgttgttgagttttagagctagaaatag

SEQ ID NO: 16830 - DNA, 57 bp, Artificial Sequence
  Synthetic Sequence
taatacgactcactatagcatcacaggaactttctaaagttttagagctagaaatag

SEQ ID NO: 16831 - DNA, 56 bp, Artificial Sequence
  Synthetic Sequence
taatacgactcactatagtaaaaccaagaggccacaggttttagagctagaaatag

SEQ ID NO: 16832 - DNA, 57 bp, Artificial Sequence
  Synthetic Sequence
taatacgactcactatagacccggccactttcaggagggttttagagctagaaatag

SEQ ID NO: 16833 - DNA, 56 bp, Artificial Sequence
  Synthetic Sequence
taatacgactcactatagattaaacccggccactttcgttttagagctagaaatag

SEQ ID NO: 16834 - DNA, 57 bp, Artificial Sequence
  Synthetic Sequence
taatacgactcactatagagcccaggtaagggcagcttgttttagagctagaaatag

SEQ ID NO: 16835 - DNA, 57 bp, Artificial Sequence
  Synthetic Sequence
taatacgactcactatagagctttgaaacaggtaagacgttttagagctagaaatag

SEQ ID NO: 16836 - DNA, 56 bp, Artificial Sequence
  Synthetic Sequence
taatacgactcactatagctttgaaacaggtaagacagttttagagctagaaatag

SEQ ID NO: 16837 - DNA, 57 bp, Artificial Sequence
  Synthetic Sequence
taatacgactcactatagtttcaaaacctgtcagtgatgttttagagctagaaatag

SEQ ID NO: 16838 - DNA, 57 bp, Artificial Sequence
  Synthetic Sequence
taatacgactcactatagctgcggctgtggtccagctggttttagagctagaaatag

SEQ ID NO: 16839 - DNA, 56 bp, Artificial Sequence
  Synthetic Sequence
taatacgactcactatagctgtggtccagctgaggtggttttagagctagaaatag

SEQ ID NO: 16840 - DNA, 57 bp, Artificial Sequence
  Synthetic Sequence
taatacgactcactatagctgtggtccagctgaggtgagttttagagctagaaatag

SEQ ID NO: 16841 - DNA, 57 bp, Artificial Sequence
  Synthetic Sequence
taatacgactcactatagtgtggtccagctgaggtgaggttttagagctagaaatag

SEQ ID NO: 16842 - DNA, 57 bp, Artificial Sequence; identical to SEQ ID NO: 16841
  Synthetic Sequence

SEQ ID NO: 16843 - DNA, 56 bp, Artificial Sequence
  Synthetic Sequence
taatacgactcactataggctgctccttgaggggctggttttagagctagaaatag

SEQ ID NO: 16844 - DNA, 56 bp, Artificial Sequence
  Synthetic Sequence
taatacgactcactataggcagtatctggagtcattggttttagagctagaaatag

SEQ ID NO: 16845 - DNA, 37 bp, Artificial Sequence
  Synthetic Sequence
taatacgactcactataggcctcggcgctgacgatct

SEQ ID NO: 16846 - DNA, 37 bp, Artificial Sequence
  Synthetic Sequence
taatacgactcactataggctctcggagaatgacgag

SEQ ID NO: 16847 - DNA, 56 bp, Artificial Sequence
  Synthetic Sequence
taatacgactcactataggcctcggcgctgacgatctgttttagagctagaaatag

SEQ ID NO: 16848 - DNA, 56 bp, Artificial Sequence
  Synthetic Sequence
taatacgactcactataggagaatgacgagtggacccgttttagagctagaaatag

SEQ ID NO: 16849 - DNA, 56 bp, Artificial Sequence
  Synthetic Sequence
taatacgactcactataggctctcggagaatgacgaggttttagagctagaaatag

SEQ ID NO: 16850 - DNA, 57 bp, Artificial Sequence
  Synthetic Sequence
taatacgactcactatagcaaacacagcgacctcgggtgttttagagctagaaatag

SEQ ID NO: 16851 - DNA, 57 bp, Artificial Sequence
  Synthetic Sequence
taatacgactcactatagtggctcaaacacagcgacctgttttagagctagaaatag

SEQ ID NO: 16852 - DNA, 57 bp, Artificial Sequence
  Synthetic Sequence
taatacgactcactatagagggcgggctgctccttgaggttttagagctagaaatag

SEQ ID NO: 16853 - DNA, 56 bp, Artificial Sequence
  Synthetic Sequence
taatacgactcactatagtatctggagtcattgaggggttttagagctagaaatag

SEQ ID NO: 16854 - DNA, 57 bp, Artificial Sequence
  Synthetic Sequence
taatacgactcactatagactggacttgacagcggaaggttttagagctagaaatag

SEQ ID NO: 16855 - DNA, 57 bp, Artificial Sequence
  Synthetic Sequence
taatacgactcactatagagagatctcccacacccaaagttttagagctagaaatag

SEQ ID NO: 16856 - DNA, 57 bp, Artificial Sequence
  Synthetic Sequence
taatacgactcactatagccacacccaaaaggccacacgttttagagctagaaatag

SEQ ID NO: 16857 - DNA, 57 bp, Artificial Sequence
  Synthetic Sequence
taatacgactcactatagactgcctgagcagccgcctggttttagagctagaaatag

SEQ ID NO: 16858 - DNA, 57 bp, Artificial Sequence
  Synthetic Sequence
taatacgactcactatagtgagggtctcggccaccttcgttttagagctagaaatag

SEQ ID NO: 16859 - DNA, 57 bp, Artificial Sequence
  Synthetic Sequence
taatacgactcactatagatgacgagtggacccaggatgttttagagctagaaatag

SEQ ID NO: 16860 - DNA, 57 bp, Artificial Sequence; identical to SEQ ID NO: 16851
  Synthetic Sequence

SEQ ID NO: 16861 - DNA, 57 bp, Artificial Sequence; identical to SEQ ID NO: 16856
  Synthetic Sequence

SEQ ID NO: 16862 - DNA, 57 bp, Artificial Sequence
  Synthetic Sequence
taatacgactcactatagagacaggtgacggtccctgcgttttagagctagaaatag

SEQ ID NO: 16863 - DNA, 56 bp, Artificial Sequence
  Synthetic Sequence
taatacgactcactatagcagtgccaggttagagagagttttagagctagaaatag

SEQ ID NO: 16864 - DNA, 56 bp, Artificial Sequence
  Synthetic Sequence
taatacgactcactatagaagttgacttactgaagaagttttagagctagaaatag

SEQ ID NO: 16865 - DNA, 57 bp, Artificial Sequence
  Synthetic Sequence
taatacgactcactatagacccagacacatagcaattcgttttagagctagaaatag

SEQ ID NO: 16866 - DNA, 57 bp, Artificial Sequence
  Synthetic Sequence
taatacgactcactatagtcacgtcatccagcagagaagttttagagctagaaatag

SEQ ID NO: 16867 - DNA, 56 bp, Artificial Sequence
  Synthetic Sequence
taatacgactcactatagatattcctcaggtactccagttttagagctagaaatag

SEQ ID NO: 16868 - DNA, 56 bp, Artificial Sequence
  Synthetic Sequence
taatacgactcactataggccacggagcgagacatctgttttagagctagaaatag

SEQ ID NO: 16869 - DNA, 57 bp, Artificial Sequence
  Synthetic Sequence
taatacgactcactatagactctctctttctggcctgggttttagagctagaaatag

SEQ ID NO: 16870 - DNA, 55 bp, Artificial Sequence
  Synthetic Sequence
taatacgactcactataggagagagaattgaaaaaggttttagagctagaaatag

SEQ ID NO: 16871 - DNA, 20 bp, Artificial Sequence
  Synthetic Sequence
catcgctgttaagaagctcc

SEQ ID NO: 16872 - DNA, 20 bp, Artificial Sequence
  Synthetic Sequence
ggccctccagctgggagtcc

SEQ ID NO: 16873 - DNA, 20 bp, Artificial Sequence
  Synthetic Sequence
gggtctgctgggtctggatg

SEQ ID NO: 16874 - DNA, 20 bp, Artificial Sequence
  Synthetic Sequence
gttctgaggcaggggtctgc

SEQ ID NO: 16875 - DNA, 20 bp, Artificial Sequence
  Synthetic Sequence
cccgccccaacgctgccccc

SEQ ID NO: 16876 - DNA, 20 bp, Artificial Sequence
  Synthetic Sequence
ccttcgcacaggtacctaac

SEQ ID NO: 16877 - DNA, 20 bp, Artificial Sequence
  Synthetic Sequence
gtcttggggctcttagcatc

SEQ ID NO: 16878 - DNA, 20 bp, Artificial Sequence
  Synthetic Sequence
acggccttgctgtggggaag

SEQ ID NO: 16879 - DNA, 20 bp, Artificial Sequence
  Synthetic Sequence
tctgatgatcttgccaaagt

SEQ ID NO: 16880 - DNA, 20 bp, Artificial Sequence
  Synthetic Sequence
ctaccacttctatgaccaga

SEQ ID NO: 16881 - DNA, 20 bp, Artificial Sequence
  Synthetic Sequence
cagtaagtttgtggtgggtg

SEQ ID NO: 16882 - DNA, 20 bp, Artificial Sequence
  Synthetic Sequence
ggaccctgaagaccccggag

SEQ ID NO: 16883 - DNA, 20 bp, Artificial Sequence
  Synthetic Sequence
cccggagaggaggctgcaga

SEQ ID NO: 16884 - DNA, 20 bp, Artificial Sequence
  Synthetic Sequence
ctgtgcgaaggggccgggga

SEQ ID NO: 16885 - DNA, 20 bp, Artificial Sequence
  Synthetic Sequence
agaggaggctggggaggacg

SEQ ID NO: 16886 - DNA, 20 bp, Artificial Sequence
  Synthetic Sequence
cccaggtggtgctgaggctg

SEQ ID NO: 16887 - DNA, 20 bp, Artificial Sequence
  Synthetic Sequence
gggatcctggtaagtgtgtt

SEQ ID NO: 16888 - DNA, 20 bp, Artificial Sequence
  Synthetic Sequence
atcaaagctcgaaggcttgg

SEQ ID NO: 16889 - DNA, 20 bp, Artificial Sequence
  Synthetic Sequence
gcagtgccaggttagagaga

SEQ ID NO: 16890 - DNA, 20 bp, Artificial Sequence
  Synthetic Sequence
caagccagcgacgcagtgcc

SEQ ID NO: 16891 - DNA, 20 bp, Artificial Sequence
  Synthetic Sequence
ccaatcaggacaaggcccgc

SEQ ID NO: 16892 - DNA, 20 bp, Artificial Sequence
  Synthetic Sequence
acccagacacatagcaattc

SEQ ID NO: 16893 - DNA, 20 bp, Artificial Sequence
  Synthetic Sequence
gatattcctcaggtactcca

SEQ ID NO: 16894 - DNA, 20 bp, Artificial Sequence
  Synthetic Sequence
ggccacggagcgagacatct

SEQ ID NO: 16895 - DNA, 20 bp, Artificial Sequence
  Synthetic Sequence
catcgctgttaagaagctcc

SEQ ID NO: 16896 - DNA, 20 bp, Artificial Sequence
  Synthetic Sequence
ggtccatctggtcatagaag

SEQ ID NO: 16897 - DNA, 20 bp, Artificial Sequence
  Synthetic Sequence
ggccctccagctgggagtcc

SEQ ID NO: 16898 - DNA, 20 bp, Artificial Sequence
  Synthetic Sequence
ccttgctcaggccctccagc

SEQ ID NO: 16899 - DNA, 20 bp, Artificial Sequence
  Synthetic Sequence
gggtctgctgggtctggatg

SEQ ID NO: 16900 - DNA, 20 bp, Artificial Sequence
  Synthetic Sequence
gttctgaggcaggggtctgc

SEQ ID NO: 16901 - DNA, 20 bp, Artificial Sequence
  Synthetic Sequence
tgagagtggtggagtgcttc

SEQ ID NO: 16902 - DNA, 20 bp, Artificial Sequence
  Synthetic Sequence
ctcgttccctcgctgccggt

SEQ ID NO: 16903 - DNA, 20 bp, Artificial Sequence
  Synthetic Sequence
cccgccccaacgctgccccc

SEQ ID NO: 16904 - DNA, 20 bp, Artificial Sequence
  Synthetic Sequence
ccttcgcacaggtacctaac

SEQ ID NO: 16905 - DNA, 20 bp, Artificial Sequence
  Synthetic Sequence
cagccggggctagggccgcg

SEQ ID NO: 16906 - DNA, 20 bp, Artificial Sequence
  Synthetic Sequence
gccgcggccgccaccgaggc

SEQ ID NO: 16907 - DNA, 20 bp, Artificial Sequence
  Synthetic Sequence
gccgcgctctcgcctccccc

SEQ ID NO: 16908 - DNA, 20 bp, Artificial Sequence
  Synthetic Sequence
gtcttggggctcttagcatc

SEQ ID NO: 16909 - DNA, 20 bp, Artificial Sequence
  Synthetic Sequence
acggccttgctgtggggaag

SEQ ID NO: 16910 - DNA, 20 bp, Artificial Sequence
  Synthetic Sequence
tctgatgatcttgccaaagt

SEQ ID NO: 16911 - DNA, 20 bp, Artificial Sequence
  Synthetic Sequence
gtcttggggctcttagcatc

SEQ ID NO: 16912 - DNA, 20 bp, Artificial Sequence
  Synthetic Sequence
aggctcatcttctgccatcc

SEQ ID NO: 16913 - DNA, 20 bp, Artificial Sequence
  Synthetic Sequence
agacaggtgacggtccctgc

SEQ ID NO: 16914 - DNA, 20 bp, Artificial Sequence
  Synthetic Sequence
cctgcgggccttgtcctgat

SEQ ID NO: 16915 - DNA, 20 bp, Artificial Sequence
  Synthetic Sequence
tataagtggaggcgtcgcgc

SEQ ID NO: 16916 - DNA, 20 bp, Artificial Sequence
  Synthetic Sequence
gaagttgacttactgaagaa

SEQ ID NO: 16917 - DNA, 20 bp, Artificial Sequence
  Synthetic Sequence
tcacgtcatccagcagagaa

SEQ ID NO: 16918 - DNA, 20 bp, Artificial Sequence
  Synthetic Sequence
actctctctttctggcctgg

SEQ ID NO: 16919 - DNA, 20 bp, Artificial Sequence
  Synthetic Sequence
ctaccacttctatgaccaga

SEQ ID NO: 16920 - DNA, 20 bp, Artificial Sequence
  Synthetic Sequence
agattgagctctactcaggt

SEQ ID NO: 16921 - DNA, 20 bp, Artificial Sequence
  Synthetic Sequence
cagtaagtttgtggtgggtg

SEQ ID NO: 16922 - DNA, 20 bp, Artificial Sequence
  Synthetic Sequence
tgtggtgggtggggaggtct

SEQ ID NO: 16923 - DNA, 20 bp, Artificial Sequence
  Synthetic Sequence
ggaccctgaagaccccggag

SEQ ID NO: 16924 - DNA, 20 bp, Artificial Sequence
  Synthetic Sequence
cccggagaggaggctgcaga

SEQ ID NO: 16925 - DNA, 20 bp, Artificial Sequence
  Synthetic Sequence
gaacgaggtgtcagctctgc

SEQ ID NO: 16926 - DNA, 20 bp, Artificial Sequence
  Synthetic Sequence
ggccaccctagactgtgagt

SEQ ID NO: 16927 - DNA, 20 bp, Artificial Sequence
  Synthetic Sequence
ctgtgcgaaggggccgggga

SEQ ID NO: 16928 - DNA, 20 bp, Artificial Sequence
  Synthetic Sequence
agaggaggctggggaggacg

SEQ ID NO: 16929 - DNA, 20 bp, Artificial Sequence
  Synthetic Sequence
cttggcgccagcctcggtgg

SEQ ID NO: 16930 - DNA, 20 bp, Artificial Sequence
  Synthetic Sequence
ctagtgatgcaaccctgtgc

SEQ ID NO: 16931 - DNA, 20 bp, Artificial Sequence
  Synthetic Sequence
gaggacgaggagactcactc

SEQ ID NO: 16932 - DNA, 20 bp, Artificial Sequence
  Synthetic Sequence
cccaggtggtgctgaggctg

SEQ ID NO: 16933 - DNA, 20 bp, Artificial Sequence
  Synthetic Sequence
gggatcctggtaagtgtgtt

SEQ ID NO: 16934 - DNA, 20 bp, Artificial Sequence
  Synthetic Sequence
atcaaagctcgaaggcttgg

SEQ ID NO: 16935 - DNA, 20 bp, Artificial Sequence
  Synthetic Sequence
ccccaggtggtgctgaggct

SEQ ID NO: 16936 - DNA, 20 bp, Artificial Sequence
  Synthetic Sequence
actgggggaagggccccccc

SEQ ID NO: 16937 - DNA, 19 bp, Artificial Sequence
  Synthetic Sequence
ggagagagaattgaaaaag

SEQ ID NO: 16938 - DNA, 19 bp, Artificial Sequence
  Synthetic Sequence
gggccttgtcctgattggc

SEQ ID NO: 16939 - DNA, 18 bp, Artificial Sequence
  Synthetic Sequence
ggcactgcgtcgctggct

SEQ ID NO: 16940 - DNA, 20 bp, Artificial Sequence
  Synthetic Sequence
ggtccatctggtcatagaag

SEQ ID NO: 16941 - DNA, 19 bp, Artificial Sequence
  Synthetic Sequence
ggagtcctggaagacatac

SEQ ID NO: 16942 - DNA, 19 bp, Artificial Sequence
  Synthetic Sequence
ggtccccaagttctgaggc

SEQ ID NO: 16943 - DNA, 19 bp, Artificial Sequence
  Synthetic Sequence
ggcaggggtctgctgggtc

SEQ ID NO: 16944 - DNA, 19 bp, Artificial Sequence
  Synthetic Sequence
ggcccccgggggcagcgtt

SEQ ID NO: 16945 - DNA, 19 bp, Artificial Sequence
  Synthetic Sequence
ggtacctgtgcgaaggggc

SEQ ID NO: 16946 - DNA, 18 bp, Artificial Sequence
  Synthetic Sequence
gggaagggcccccccagg

SEQ ID NO: 16947 - DNA, 19 bp, Artificial Sequence
  Synthetic Sequence
gccttcgagctttgatgtc

SEQ ID NO: 16948-16971 - skipped (24 entries)

SEQ ID NO: 16972 - protein, 500 aa, Homo Sapiens
MSRSVALAVLALLSLSGLEAVMAPRTLILGGGGSGGGGSGGGGSIQRTPKIQVYSRHPAENGKSNFLNCYVSGFHPSDIEVDLLKNGERIEKVEHSDLSFSKDWSFYLLYYTEFTPTEKDEYACRVNHVTLSQPKIVKWDRDMGGGGSGGGGSGGGGSGGGGSGSHSLKYFHTSVSRPGRGEPRFISVGYVDDTQFVRFDNDAASPRMVPRAPWMEQEGSEYWDRETRSARDTAQIFRVNLRTLRGYYNQSEAGSHTLQWMHGCELGPDGRFLRGYEQFAYDGKDYLTLNEDLRSWTAVDTAAQISEQKSNDASEAEHQRAYLEDTCVEWLHKYLEKGKETLLHLEPPKTHVTHHPISDHEATLRCWALGFYPAEITLTWQQDGEGHTQDTELVETRPAGDGTFQKWAAVVVPSGEEQRYTCHVQHEGLPEPVTLRWKPASQPTIPIVGIIAGLVLLGSVVSGAVVAAVIWRKKSSGGKGGSYSKAEWSDSAQGSESHSL

SEQ ID NO: 16973 - DNA, 1503 bp, Homo Sapiens
atgtctcgcagcgtggccctggccgtgctggccctgctgtccctgtctggcctggaggccgtgatggccccccggaccctgatcctgggaggaggaggcagcggcggaggaggctccggaggcggcggctctatccagcgcacacctaagatccaggtgtattctcggcacccagccgagaacggcaagagcaacttcctgaattgctacgtgagcggctttcacccttccgacatcgaggtggatctgctgaagaatggcgagagaatcgagaaggtggagcactccgacctgagcttctccaaggattggtctttttatctgctgtactataccgagtttacccctacagagaaggacgagtacgcctgtcgcgtgaaccacgtgacactgtcccagccaaagatcgtgaagtgggaccgggatatgggcggcggcggctctggcggcggcggcagcggcggcggcggctccggaggaggcggctctggcagccactccctgaagtatttccacacctctgtgagccggccaggcagaggagagccacggttcatctctgtgggctacgtggacgatacacagttcgtgaggtttgacaatgatgccgccagcccaagaatggtgcctagggccccatggatggagcaggagggcagcgagtattgggacagggagacccggagcgccagagacacagcacagattttccgggtgaacctgagaaccctgaggggctactataatcagtccgaggccggctctcacacactccagtggatgcacggatgcgagctgggaccagatggccgcttcctgcggggctacgagcagtttgcctatgacggcaaggattacctgaccctgaacgaggacctgagatcctggaccgccgtggatacagccgcccagatcagcgagcagaagtccaatgacgcatctgaggcagagcaccagagggcatatctggaggatacctgcgtggagtggctgcacaagtacctggagaagggcaaggagacactgctgcacctggagccccctaagacccacgtgacacaccacccaatcagcgaccacgaggccaccctgaggtgttgggcactgggcttctatcccgccgagatcaccctgacatggcagcaggacggagagggacacacccaggatacagagctggtggagaccaggcccgccggcgatggcacatttcagaagtgggccgccgtggtggtgccttccggagaggagcagagatacacctgtcacgtgcagcacgagggactgccagagccagtgaccctgaggtggaagcctgccagccagcccacaatccctatcgtgggaatcatcgcaggcctggtgctgctgggctctgtggtgagcggagcagtggtggccgccgtgatctggcggaagaagagcagcggaggcaagggaggctcctactccaaggcagagtggagcgactccgcccagggctctgagagccactccctgtga

SEQ ID NO: 16974 - protein, 500 aa, Homo Sapiens
MSRSVALAVLALLSLSGLEAVMAPRTLILGGGGSGGGGSGGGGSIQRTPKIQVYSRHPAENGKSNFLNCYVSGFHPSDIEVDLLKNGERIEKVEHSDLSFSKDWSFYLLYYTEFTPTEKDEYACRVNHVTLSQPKIVKWDRDMGGGGSGGGGSGGGGSGGGGSGSHSLKYFHTSVSRPGRGEPRFISVGYVDDTQFVRFDNDAASPRMVPRAPWMEQEGSEYWDRETRSARDTAQIFRVNLRTLRGYYNQSEAGSHTLQWMHGCELGPDRRFLRGYEQFAYDGKDYLTLNEDLRSWTAVDTAAQISEQKSNDASEAEHQRAYLEDTCVEWLHKYLEKGKETLLHLEPPKTHVTHHPISDHEATLRCWALGFYPAEITLTWQQDGEGHTQDTELVETRPAGDGTFQKWAAVVVPSGEEQRYTCHVQHEGLPEPVTLRWKPASQPTIPIVGIIAGLVLLGSVVSGAVVAAVIWRKKSSGGKGGSYSKAEWSDSAQGSESHSL

SEQ ID NO: 16975 - DNA, 1503 bp, Homo Sapiens
atgtctcgcagcgtggccctggccgtgctggccctgctgtccctgtctggcctggaggccgtgatggccccccggaccctgatcctgggaggaggaggcagcggcggaggaggctccggaggcggcggctctatccagcgcacacctaagatccaggtgtattctcggcacccagccgagaacggcaagagcaacttcctgaattgctacgtgagcggctttcacccttccgacatcgaggtggatctgctgaagaatggcgagagaatcgagaaggtggagcactccgacctgagcttctccaaggattggtctttttatctgctgtactataccgagtttacccctacagagaaggacgagtacgcctgtcgcgtgaaccacgtgacactgtcccagccaaagatcgtgaagtgggaccgggatatgggcggcggcggctctggcggcggcggcagcggcggcggcggctccggaggaggcggctctggcagccactccctgaagtatttccacacctctgtgagccggccaggcagaggagagccacggttcatctctgtgggctacgtggacgatacacagttcgtgaggtttgacaatgatgccgccagcccaagaatggtgcctagggccccatggatggagcaggagggcagcgagtattgggacagggagacccggagcgccagagacacagcacagattttccgggtgaacctgagaaccctgaggggctactataatcagtccgaggccggctctcacacactccagtggatgcacggatgcgagctgggaccagatcgccgcttcctgcggggctacgagcagtttgcctatgacggcaaggattacctgaccctgaacgaggacctgagatcctggaccgccgtggatacagccgcccagatcagcgagcagaagtccaatgacgcatctgaggcagagcaccagagggcatatctggaggatacctgcgtggagtggctgcacaagtacctggagaagggcaaggagacactgctgcacctggagccccctaagacccacgtgacacaccacccaatcagcgaccacgaggccaccctgaggtgttgggcactgggcttctatcccgccgagatcaccctgacatggcagcaggacggagagggacacacccaggatacagagctggtggagaccaggcccgccggcgatggcacatttcagaagtgggccgccgtggtggtgccttccggagaggagcagagatacacctgtcacgtgcagcacgagggactgccagagccagtgaccctgaggtggaagcctgccagccagcccacaatccctatcgtgggaatcatcgcaggcctggtgctgctgggctctgtggtgagcggagcagtggtggccgccgtgatctggcggaagaagagcagcggaggcaagggaggctcctactccaaggcagagtggagcgactccgcccagggctctgagagccactccctgtga

SEQ ID NO: 16976 - protein, 476 aa, Homo Sapiens
MSRSVALAVLALLSLSGLEAIQRTPKIQVYSRHPAENGKSNFLNCYVSGFHPSDIEVDLLKNGERIEKVEHSDLSFSKDWSFYLLYYTEFTPTEKDEYACRVNHVTLSQPKIVKWDRDMGGGGSGGGGSGGGGSGGGGSGSHSLKYFHTSVSRPGRGEPRFISVGYVDDTQFVRFDNDAASPRMVPRAPWMEQEGSEYWDRETRSARDTAQIFRVNLRTLRGYYNQSEAGSHTLQWMHGCELGPDRRFLRGYEQFAYDGKDYLTLNEDLRSWTAVDTAAQISEQKSNDASEAEHQRAYLEDTCVEWLHKYLEKGKETLLHLEPPKTHVTHHPISDHEATLRCWALGFYPAEITLTWQQDGEGHTQDTELVETRPAGDGTFQKWAAVVVPSGEEQRYTCHVQHEGLPEPVTLRWKPASQPTIPIVGIIAGLVLLGSVVSGAVVAAVIWRKKSSGGKGGSYSKAEWSDSAQGSESHSL

SEQ ID NO: 16977 - DNA, 1435 bp, Homo Sapiens
atgagcagatctgtggccctggctgttctggctctgctgtctctgtctggcctggaagccatccagcggacccctaagatccaggtgtacagcagacaccccgccgagaacggcaagagcaacttcctgaactgctacgtgtccggctttcaccccagcgacattgaggtggacctgctgaagaacggcgagcggatcgagaaggtggaacacagcgatctgagcttcagcaaggactggtccttctacctgctgtactacaccgagttcacccctaccgagaaggacgagtacgcctgcagagtgaaccacgtgacactgagccagcctaagatcgtgaagtgggacagagatatgggcggaggcggatctggtggcggaggaagtggcggcggaggatctggcggtggtggttctggatctcacagcctgaagtactttcacacctccgtgtccagacctggcagaggcgagcctagattcatcagcgtgggctacgtggacgacacccagttcgtcagattcgacaacgacgccgcctctcctcggatggttcctagagcaccctggatggaacaagagggcagcgagtactgggatcgcgagacaagaagcgccagagacacagcccagatcttccgcgtgaacctgagaaccctgcggggctactacaatcagtctgaggccggctctcacaccctgcagtggatgcatggatgtgaactgggccccgacagacggttcctgagaggctatgagcagttcgcctacgacggcaaggactacctgacactgaacgaggacctgagaagctggaccgccgtggatacagccgctcagatcagcgagcagaagtctaacgacgccagcgaggccgaacaccagagagcctatctggaagatacctgcgtggaatggctgcacaagtacctggaaaagggcaaagagacactgctgcacctggaacctccaaagacacatgtgacccaccatcctatcagcgaccacgaggccacactgagatgttgggccctgggcttttaccctgccgagatcacactgacatggcagcaggatggcgagggccacacacaggatacagagctggtggaaacaagacctgccggcgacggcaccttccagaaatgggctgctgtggttgtgcccagcggcgaggaacagagatacacctgtcacgtgcagcacgagggactgcctgaacctgtgactctgagatggaagcctgccagccagccaacaatccccatcgtgggaatcattgccggcctggtgctgctgggatctgtggtttctggtgctgtggtggccgccgtgatttggagaaagaagtcctctggcggcaaaggcggctcctactctaaggccgagtggagcgattctgcccagggctctgaaagccacagcctgtagataa

SEQ ID NO: 16978 - protein, 419 aa, Homo Sapiens
DLLKNGERIEKVEHSDLSFSKDWSFYLLYYTEFTPTEKDEYACRVNHVTLSQPKIVKWDRDMGGGGSGGGGSGGGGSGGGGSGSHSLKYFHTSVSRPGRGEPRFISVGYVDDTQFVRFDNDAASPRMVPRAPWMEQEGSEYWDRETRSARDTAQIFRVNLRTLRGYYNQSEAGSHTLQWMHGCELGPDGRFLRGYEQFAYDGKDYLTLNEDLRSWTAVDTAAQISEQKSNDASEAEHQRAYLEDTCVEWLHKYLEKGKETLLHLEPPKTHVTHHPISDHEATLRCWALGFYPAEITLTWQQDGEGHTQDTELVETRPAGDGTFQKWAAVVVPSGEEQRYTCHVQHEGLPEPVTLRWKPASQPTIPIVGIIAGLVLLGSVVSGAVVAAVIWRKKSSGGKGGSYSKAEWSDSAQGSESHSL

SEQ ID NO: 16979 - DNA, 1435 bp, Homo Sapiens
atgagcagatctgtggccctggctgttctggctctgctgtctctgtctggcctggaagccatccagcggacccctaagatccaggtgtacagcagacaccccgccgagaacggcaagagcaacttcctgaactgctacgtgtccggctttcaccccagcgacattgaggtggacctgctgaagaacggcgagcggatcgagaaggtggaacacagcgatctgagcttcagcaaggactggtccttctacctgctgtactacaccgagttcacccctaccgagaaggacgagtacgcctgcagagtgaaccacgtgacactgagccagcctaagatcgtgaagtgggacagagatatgggcggaggcggatctggtggcggaggaagtggcggcggaggatctggcggtggtggttctggatctcacagcctgaagtactttcacacctccgtgtccagacctggcagaggcgagcctagattcatcagcgtgggctacgtggacgacacccagttcgtcagattcgacaacgacgccgcctctcctcggatggttcctagagcaccctggatggaacaagagggcagcgagtactgggatcgcgagacaagaagcgccagagacacagcccagatcttccgcgtgaacctgagaaccctgcggggctactacaatcagtctgaggccggctctcacaccctgcagtggatgcatggatgtgaactgggccccgacagacagttcctgagaggctatgagcagttcgcctacgacggcaaggactacctgacactgaacgaggacctgagaagctggaccgccgtggatacagccgctcagatcagcgagcagaagtctaacgacgccagcgaggccgaacaccagagagcctatctggaagatacctgcgtggaatggctgcacaagtacctggaaaagggcaaagagacactgctgcacctggaacctccaaagacacatgtgacccaccatcctatcagcgaccacgaggccacactgagatgttgggccctgggcttttaccctgccgagatcacactgacatggcagcaggatggcgagggccacacacaggatacagagctggtggaaacaagacctgccggcgacggcaccttccagaaatgggctgctgtggttgtgcccagcggcgaggaacagagatacacctgtcacgtgcagcacgagggactgcctgaacctgtgactctgagatggaagcctgccagccagccaacaatccccatcgtgggaatcattgccggcctggtgctgctgggatctgtggtttctggtgctgtggtggccgccgtgatttggagaaagaagtcctctggcggcaaaggcggctcctactctaaggccgagtggagcgattctgcccagggctctgaaagccacagcctgtagataa

SEQ ID NO: 16980 - protein, 357 aa, Homo Sapiens
MSRSVALAVLALLSLSGLEAGSHSLKYFHTSVSRPGRGEPRFISVGYVDDTQFVRFDNDAASPRMVPRAPWMEQEGSEYWDRETRSARDTAQIFRVNLRTLRGYYNQSEAGSHTLQWMHGCELGPDRRFLRGYEQFAYDGKDYLTLNEDLRSWTAVDTAAQISEQKSNDASEAEHQRAYLEDTCVEWLHKYLEKGKETLLHLEPPKTHVTHHPISDHEATLRCWALGFYPAEITLTWQQDGEGHTQDTELVETRPAGDGTFQKWAAVVVPSGEEQRYTCHVQHEGLPEPVTLRWKPASQPTIPIVGIIAGLVLLGSVVSGAVVAAVIWRKKSSGGKGGSYSKAEWSDSAQGSESHSL

SEQ ID NO: 16981 - DNA, 1078 bp, Homo Sapiens
atgagcagatctgtggccctggctgttctggctctgctgtctctgtctggactggaagccggcagccacagcctgaagtactttcacaccagcgtgtccagacctggcagaggcgagcctagattcatcagcgtgggctacgtggacgacacccagttcgtcagattcgacaacgacgccgcctctcctcggatggttcctagagcaccctggatggaacaagagggcagcgagtactgggacagagagacaagaagcgccagagacacagcccagatcttcagagtgaacctgcggaccctgcggggctactacaatcagtctgaagccggctctcacaccctgcagtggatgcacggatgtgaactgggccccgacagaagattcctgagaggctacgagcagttcgcctacgacggcaaggactacctgacactgaacgaggacctgagaagctggaccgccgtggatacagccgctcagatcagcgagcagaagtctaacgacgcctctgaggccgaacaccagagagcctacctggaagatacctgcgtggaatggctgcacaagtacctggaaaagggcaaagagacactgctgcacctggaacctccaaagacacacgtgacccaccatcctatcagcgaccacgaggccacactgagatgttgggccctgggcttttaccccgccgagatcacactgacatggcagcaggatggcgagggccacacacaggatacagagctggtggaaacaagacctgccggcgacggcaccttccagaaatgggctgctgtggtggttcccagcggcgaggaacagagatacacctgtcacgtgcagcacgagggactgcctgaacctgtgacactgaggtggaagcctgccagccagcctacaatccccatcgtgggaatcattgccggcctggtgctgctgggatctgtggtttctggtgcagtggtggccgccgtgatctggcggaaaaaaagctcaggcggcaaaggcggctcctactccaaagccgagtggagcgattctgcccagggctctgaaagccactctctgtagataa

SEQ ID NO: 16982 - protein, 357 aa, Homo Sapiens
MSRSVALAVLALLSLSGLEAGSHSLKYFHTSVSRPGRGEPRFISVGYVDDTQFVRFDNDAASPRMVPRAPWMEQEGSEYWDRETRSARDTAQIFRVNLRTLRGYYNQSEAGSHTLQWMHGCELGPDGRFLRGYEQFAYDGKDYLTLNEDLRSWTAVDTAAQISEQKSNDASEAEHQRAYLEDTCVEWLHKYLEKGKETLLHLEPPKTHVTHHPISDHEATLRCWALGFYPAEITLTWQQDGEGHTQDTELVETRPAGDGTFQKWAAVVVPSGEEQRYTCHVQHEGLPEPVTLRWKPASQPTIPIVGIIAGLVLLGSVVSGAVVAAVIWRKKSSGGKGGSYSKAEWSDSAQGSESHSL

SEQ ID NO: 16983 - DNA, 1078 bp, Homo Sapiens
atgagcagatctgtggccctggctgttctggctctgctgtctctgtctggactggaagccggcagccacagcctgaagtactttcacaccagcgtgtccagacctggcagaggcgagcctagattcatcagcgtgggctacgtggacgacacccagttcgtcagattcgacaacgacgccgcctctcctcggatggttcctagagcaccctggatggaacaagagggcagcgagtactgggacagagagacaagaagcgccagagacacagcccagatcttcagagtgaacctgcggaccctgcggggctactacaatcagtctgaagccggctctcacaccctgcagtggatgcacggatgtgaactgggccccgacggaagattcctgagaggctacgagcagttcgcctacgacggcaaggactacctgacactgaacgaggacctgagaagctggaccgccgtggatacagccgctcagatcagcgagcagaagtctaacgacgcctctgaggccgaacaccagagagcctacctggaagatacctgcgtggaatggctgcacaagtacctggaaaagggcaaagagacactgctgcacctggaacctccaaagacacacgtgacccaccatcctatcagcgaccacgaggccacactgagatgttgggccctgggcttttaccccgccgagatcacactgacatggcagcaggatggcgagggccacacacaggatacagagctggtggaaacaagacctgccggcgacggcaccttccagaaatgggctgctgtggtggttcccagcggcgaggaacagagatacacctgtcacgtgcagcacgagggactgcctgaacctgtgacactgaggtggaagcctgccagccagcctacaatccccatcgtgggaatcattgccggcctggtgctgctgggatctgtggtttctggtgcagtggtggccgccgtgatctggcggaaaaaaagctcaggcggcaaaggcggctcctactccaaagccgagtggagcgattctgcccagggctctgaaagccactctctgtagataa

SEQ ID NO: 16984-17005 - skipped (22 entries)

SEQ ID NO: 17006 - DNA, 5296 bp, Artificial Sequence; identical to SEQ ID NO: 14475
  Synthetic Sequence

SEQ ID NO: 17007 - DNA, 4682 bp, Artificial Sequence; identical to SEQ ID NO: 14476
  Synthetic Sequence

SEQ ID NO: 17008 - protein, 1053 aa, Artificial Sequence
  Synthetic Sequence
MKRNYILGLAIGITSVGYGIIDYETRDVIDAGVRLFKEANVENNEGRRSKRGARRLKRRRRHRIQRVKKLLFDYNLLTDHSELSGINPYEARVKGLSQKLSEEEFSAALLHLAKRRGVHNVNEVEEDTGNELSTKEQISRNSKALEEKYVAELQLERLKKDGEVRGSINRFKTSDYVKEAKQLLKVQKAYHQLDQSFIDTYIDLLETRRTYYEGPGEGSPFGWKDIKEWYEMLMGHCTYFPEELRSVKYAYNADLYNALNDLNNLVITRDENEKLEYYEKFQIIENVFKQKKKPTLKQIAKEILVNEEDIKGYRVTSTGKPEFTNLKVYHDIKDITARKEIIENAELLDQIAKILTIYQSSEDIQEELTNLNSELTQEEIEQISNLKGYTGTHNLSLKAINLILDELWHTNDNQIAIFNRLKLVPKKVDLSQQKEIPTTLVDDFILSPVVKRSFIQSIKVINAIIKKYGLPNDIIIELAREKNSKDAQKMINEMQKRNRQTNERIEEIIRTTGKENAKYLIEKIKLHDMQEGKCLYSLEAIPLEDLLNNPFNYEVDHIIPRSVSFDNSFNNKVLVKQEEASKKGNRTPFQYLSSSDSKISYETFKKHILNLAKGKGRISKTKKEYLLEERDINRFSVQKDFINRNLVDTRYATRGLMNLLRSYFRVNNLDVKVKSINGGFTSFLRRKWKFKKERNKGYKHHAEDALIIANADFIFKEWKKLDKAKKVMENQMFEEKQAESMPEIETEQEYKEIFITPHQIKHIKDFKDYKYSHRVDKKPNRELINDTLYSTRKDDKGNTLIVNNLNGLYDKDNDKLKKLINKSPEKLLMYHHDPQTYQKLKLIMEQYGDEKNPLYKYYEETGNYLTKYSKKDNGPVIKKIKYYGNKLNAHLDITDDYPNSRNKVVKLSLKPYRFDVYLDNGVYKFVTVKNLDVIKKENYYEVNSKCYEEAKKLKKISNQAEFIASFYNNDLIKINGELYRVIGVNNDLLNRIEVNMIDITYREYLENMNDKRPPRIIKTIASKTQSIKKYSTDILGNLYEVKSKKHPQIIKKG

SEQ ID NO: 17009 - protein, 1368 aa, Staphyloccocus pyogenes
  misc_feature (1)..(1): Xaa can be any naturally occurring amino acid
XDKKYSIGLAIGTNSVGWAVITDEYKVPSKKFKVLGNTDRHSIKKNLIGALLFDSGETAEATRLKRTARRRYTRRKNRICYLQEIFSNEMAKVDDSFFHRLEESFLVEEDKKHERHPIFGNIVDEVAYHEKYPTIYHLRKKLVDSTDKADLRLIYLALAHMIKFRGHFLIEGDLNPDNSDVDKLFIQLVQTYNQLFEENPINASGVDAKAILSARLSKSRRLENLIAQLPGEKKNGLFGNLIALSLGLTPNFKSNFDLAEDAKLQLSKDTYDDDLDNLLAQIGDQYADLFLAAKNLSDAILLSDILRVNTEITKAPLSASMIKRYDEHHQDLTLLKALVRQQLPEKYKEIFFDQSKNGYAGYIDGGASQEEFYKFIKPILEKMDGTEELLVKLNREDLLRKQRTFDNGSIPHQIHLGELHAILRRQEDFYPFLKDNREKIEKILTFRIPYYVGPLARGNSRFAWMTRKSEETITPWNFEEVVDKGASAQSFIERMTNFDKNLPNEKVLPKHSLLYEYFTVYNELTKVKYVTEGMRKPAFLSGEQKKAIVDLLFKTNRKVTVKQLKEDYFKKIECFDSVEISGVEDRFNASLGTYHDLLKIIKDKDFLDNEENEDILEDIVLTLTLFEDREMIEERLKTYAHLFDDKVMKQLKRRRYTGWGRLSRKLINGIRDKQSGKTILDFLKSDGFANRNFMQLIHDDSLTFKEDIQKAQVSGQGDSLHEHIANLAGSPAIKKGILQTVKVVDELVKVMGRHKPENIVIEMARENQTTQKGQKNSRERMKRIEEGIKELGSQILKEHPVENTQLQNEKLYLYYLQNGRDMYVDQELDINRLSDYDVDAIVPQSFLKDDSIDNKVLTRSDKNRGKSDNVPSEEVVKKMKNYWRQLLNAKLITQRKFDNLTKAERGGLSELDKAGFIKRQLVETRQITKHVAQILDSRMNTKYDENDKLIREVKVITLKSKLVSDFRKDFQFYKVREINNYHHAHDAYLNAVVGTALIKKYPKLESEFVYGDYKVYDVRKMIAKSEQEIGKATAKYFFYSNIMNFFKTEITLANGEIRKRPLIETNGETGEIVWDKGRDFATVRKVLSMPQVNIVKKTEVQTGGFSKESILPKRNSDKLIARKKDWDPKKYGGFDSPTVAYSVLVVAKVEKGKSKKLKSVKELLGITIMERSSFEKNPIDFLEAKGYKEVKKDLIIKLPKYSLFELENGRKRMLASAGELQKGNELALPSKYVNFLYLASHYEKLKGSPEDNEQKQLFVEQHKHYLDEIIEQISEFSKRVILADANLDKVLSAYNKHRDKPIREQAENIIHLFTLTNLGAPAAFKYFDTTIDRKRYTSTKEVLDATLIHQSITGLYETRIDLSQLGGD

SEQ ID NO: 17010 - protein, 199 aa, Artificial Sequence
  Synthetic Sequence
EGIKSNISLLKDELRGQISHISHEYLSLIDLAFDSKQNRLFEMKVLELLVNEYGFKGRHLGGSRKPDGIVYSTTLEDNFGIIVDTKAYSEGYSLPISQADEMERYVRENSNRDEEVNPNKWWENFSEEVKKYYFVFISGSFKGKFEEQLRRLSMTTGVNGSAVNVVNLLLGAEKIRSGEMTIEELERAMFNNSEFILKY

SEQ ID NO: 17011 - protein, 1591 aa, Artificial Sequence
  Synthetic Sequence
MAPKKKRKVEGIKSNISLLKDELRGQISHISHEYLSLIDLAFDSKQNRLFEMKVLELLVNEYGFKGRHLGGSRKPDGIVYSTTLEDNFGIIVDTKAYSEGYSLPISQADEMERYVRENSNRDEEVNPNKWWENFSEEVKKYYFVFISGSFKGKFEEQLRRLSMTTGVNGSAVNVVNLLLGAEKIRSGEMTIEELERAMFNNSEFILKYGGGGSDKKYSIGLAIGTNSVGWAVITDEYKVPSKKFKVLGNTDRHSIKKNLIGALLFDSGETAEATRLKRTARRRYTRRKNRICYLQEIFSNEMAKVDDSFFHRLEESFLVEEDKKHERHPIFGNIVDEVAYHEKYPTIYHLRKKLVDSTDKADLRLIYLALAHMIKFRGHFLIEGDLNPDNSDVDKLFIQLVQTYNQLFEENPINASGVDAKAILSARLSKSRRLENLIAQLPGEKKNGLFGNLIALSLGLTPNFKSNFDLAEDAKLQLSKDTYDDDLDNLLAQIGDQYADLFLAAKNLSDAILLSDILRVNTEITKAPLSASMIKRYDEHHQDLTLLKALVRQQLPEKYKEIFFDQSKNGYAGYIDGGASQEEFYKFIKPILEKMDGTEELLVKLNREDLLRKQRTFDNGSIPHQIHLGELHAILRRQEDFYPFLKDNREKIEKILTFRIPYYVGPLARGNSRFAWMTRKSEETITPWNFEEVVDKGASAQSFIERMTNFDKNLPNEKVLPKHSLLYEYFTVYNELTKVKYVTEGMRKPAFLSGEQKKAIVDLLFKTNRKVTVKQLKEDYFKKIECFDSVEISGVEDRFNASLGTYHDLLKIIKDKDFLDNEENEDILEDIVLTLTLFEDREMIEERLKTYAHLFDDKVMKQLKRRRYTGWGRLSRKLINGIRDKQSGKTILDFLKSDGFANRNFMQLIHDDSLTFKEDIQKAQVSGQGDSLHEHIANLAGSPAIKKGILQTVKVVDELVKVMGRHKPENIVIEMARENQTTQKGQKNSRERMKRIEEGIKELGSQILKEHPVENTQLQNEKLYLYYLQNGRDMYVDQELDINRLSDYDVDAIVPQSFLKDDSIDNKVLTRSDKNRGKSDNVPSEEVVKKMKNYWRQLLNAKLITQRKFDNLTKAERGGLSELDKAGFIKRQLVETRQITKHVAQILDSRMNTKYDENDKLIREVKVITLKSKLVSDFRKDFQFYKVREINNYHHAHDAYLNAVVGTALIKKYPKLESEFVYGDYKVYDVRKMIAKSEQEIGKATAKYFFYSNIMNFFKTEITLANGEIRKRPLIETNGETGEIVWDKGRDFATVRKVLSMPQVNIVKKTEVQTGGFSKESILPKRNSDKLIARKKDWDPKKYGGFDSPTVAYSVLVVAKVEKGKSKKLKSVKELLGITIMERSSFEKNPIDFLEAKGYKEVKKDLIIKLPKYSLFELENGRKRMLASAGELQKGNELALPSKYVNFLYLASHYEKLKGSPEDNEQKQLFVEQHKHYLDEIIEQISEFSKRVILADANLDKVLSAYNKHRDKPIREQAENIIHLFTLTNLGAPAAFKYFDTTIDRKRYTSTKEVLDATLIHQSITGLYETRIDLSQLGGDGSPKKKRKVSS

SEQ ID NO: 17012 - protein, 187 aa, Artificial Sequence
  Synthetic Sequence
MVGSLNCIVAVSQNMGIGKNGDFPWPPLRNESRYFQRMTTTSSVEGKQNLVIMGKKTWFSIPEKNRPLKGRINLVLSRELKEPPQGAHFLSRSLDDALKLTEQPELANKVDMVWIVGGSSVYKEAMNHPGHLKLFVTRIMQDFESDTFFPEIDLEKYKLLPEYPGVLSDVQEEKGIKYKFEVYEKND

SEQ ID NO: 17013 - protein, 1591 aa, Artificial Sequence; identical to SEQ ID NO: 17011
  Synthetic Sequence

SEQ ID NO: 17014 - DNA, 4776 bp, Artificial Sequence
  Synthetic Sequence
atggcaccaaagaagaaaagaaaagtggagggcatcaagtcaaacatcagcctgctgaaagacgaactgcggggacagattagtcacatcagtcacgagtacctgtcactgattgatctggccttcgacagcaagcagaatagactgtttgagatgaaagtgctggaactgctggtcaacgagtatggcttcaagggcagacatctgggcgggtctaggaaacctgacggcatcgtgtacagtaccacactggaagacaacttcggaatcattgtcgataccaaggcttattccgagggctactctctgccaattagtcaggcagatgagatggaaaggtacgtgcgcgaaaactcaaatagggacgaggaagtcaaccccaataagtggtgggagaatttcagcgaggaagtgaagaaatactacttcgtctttatctcaggcagcttcaaagggaagtttgaggaacagctgcggagactgtccatgactaccggggtgaacggatctgctgtcaacgtggtcaatctgctgctgggcgcagaaaagatcaggtccggggagatgacaattgaggaactggaacgcgccatgttcaacaattctgagtttatcctgaagtatggaggcgggggaagcgataagaaatactccatcggactggccattggcaccaattccgtgggctgggctgtcatcacagacgagtacaaggtgccaagcaagaagttcaaggtcctggggaacaccgatcgccacagtatcaagaaaaatctgattggagccctgctgttcgactcaggcgagactgctgaagcaacccgactgaagcggactgctaggcgccgatatacccggagaaaaaatcggatctgctacctgcaggaaattttcagcaacgagatggccaaggtggacgatagtttctttcaccgcctggaggaatcattcctggtggaggaagataagaaacacgagcggcatcccatctttggcaacattgtggacgaagtcgcttatcacgagaagtaccctactatctatcatctgaggaagaaactggtggactccaccgataaggcagacctgcgcctgatctatctggccctggctcacatgatcaagttccgggggcattttctgatcgagggagatctgaaccctgacaattctgatgtggacaagctgttcatccagctggtccagacatacaatcagctgtttgaggaaaacccaattaatgcctcaggcgtggacgcaaaggccatcctgagcgccagactgtccaaatctaggcgcctggaaaacctgatcgctcagctgccaggagagaagaaaaacggcctgtttgggaatctgattgcactgtccctgggcctgacacccaacttcaagtctaattttgatctggccgaggacgctaagctgcagctgtccaaagacacttatgacgatgacctggataacctgctggctcagatcggcgatcagtacgcagacctgttcctggccgctaagaatctgagtgacgccatcctgctgtcagatattctgcgcgtgaacacagagattactaaggccccactgagtgcttcaatgatcaaaagatatgacgagcaccatcaggatctgaccctgctgaaggctctggtgaggcagcagctgcccgagaaatacaaggaaatcttctttgatcagagcaagaatggatacgccggctatattgacggcggggcttcccaggaggagttctacaagttcatcaagcccattctggaaaagatggacggcaccgaggaactgctggtgaagctgaatcgggaggacctgctgagaaaacagaggacatttgataacggaagcatccctcaccagattcatctgggcgaactgcacgccatcctgcgacggcaggaggacttctacccatttctgaaggataaccgcgagaaaatcgaaaagatcctgaccttcagaatcccctactatgtggggcctctggcacggggaaatagtagatttgcctggatgacaagaaagtcagaggaaactatcaccccctggaacttcgaggaagtggtcgataaaggcgctagcgcacagtccttcattgaaaggatgacaaattttgacaagaacctgccaaatgagaaggtgctgcccaaacacagcctgctgtacgaatatttcacagtgtataacgagctgactaaagtgaagtacgtcaccgaagggatgcgcaagcccgcattcctgtccggagagcagaagaaagccatcgtggacctgctgtttaagacaaatcggaaagtgactgtcaaacagctgaaggaagactatttcaagaaaattgagtgtttcgattcagtggaaatcagcggcgtcgaggacaggtttaacgcctccctggggacctaccacgatctgctgaagatcatcaaggataaggacttcctggacaacgaggaaaatgaggacatcctggaggacattgtgctgacactgactctgtttgaggatcgcgaaatgatcgaggaacgactgaagacttatgcccatctgttcgatgacaaagtgatgaagcagctgaaaagaaggcgctacaccggatggggacgcctgagccgaaaactgatcaatgggattagagacaagcagagcggaaaaactatcctggactttctgaagtccgatggcttcgccaacaggaacttcatgcagctgattcacgatgactctctgaccttcaaggaggacatccagaaagcacaggtgtctggccagggggacagtctgcacgagcatatcgcaaacctggccggcagccccgccatcaagaaagggattctgcagaccgtgaaggtggtggacgaactggtcaaggtcatgggacgacacaaacctgagaacatcgtgattgagatggcccgcgaaaatcagacaactcagaagggccagaaaaacagtcgagaacggatgaagagaatcgaggaaggcatcaaggagctggggtcacagatcctgaaggagcatcctgtggaaaacactcagctgcagaatgagaaactgtatctgtactatctgcagaatggacgggatatgtacgtggaccaggagctggatattaacagactgagtgattatgacgtggatgccatcgtccctcagagcttcctgaaggatgactccattgacaacaaggtgctgaccaggtccgacaagaaccgcggcaaatcagataatgtgccaagcgaggaagtggtcaagaaaatgaagaactactggaggcagctgctgaatgccaagctgatcacacagcggaaatttgataacctgactaaggcagaaagaggaggcctgtctgagctggacaaggccggcttcatcaagcggcagctggtggagacaagacagatcactaagcacgtcgctcagattctggatagcagaatgaacacaaagtacgatgaaaacgacaagctgatcagggaggtgaaagtcattactctgaaatccaagctggtgtctgactttagaaaggatttccagttttataaagtcagggagatcaacaactaccaccatgctcatgacgcatacctgaacgcagtggtcgggaccgccctgattaagaaataccccaagctggagtccgagttcgtgtacggagactataaagtgtacgatgtccggaagatgatcgccaaatctgagcaggaaattggcaaggccaccgctaagtatttcttttacagtaacatcatgaatttctttaagaccgaaatcacactggcaaatggggagatcagaaaaaggcctctgattgagaccaacggggagacaggagaaatcgtgtgggacaagggaagggattttgctaccgtgcgcaaagtcctgtccatgccccaagtgaatattgtcaagaaaactgaagtgcagaccgggggattctctaaggagagtattctgcctaagcgaaactctgataaactgatcgcccggaagaaagactgggaccccaagaagtatggcgggttcgactctccaacagtggcttacagtgtcctggtggtcgcaaaggtggaaaaggggaagtccaagaaactgaagtctgtcaaagagctgctgggaatcactattatggaacgcagctccttcgagaagaatcctatcgattttctggaagccaagggctataaagaggtgaagaaagacctgatcattaagctgccaaaatactcactgtttgagctggaaaacggacgaaagcgaatgctggcaagcgccggagaactgcagaagggcaatgagctggccctgccctccaaatacgtgaacttcctgtatctggctagccactacgagaaactgaaggggtcccctgaggataacgaacagaagcagctgtttgtggagcagcacaaacattatctggacgagatcattgaacagatttcagagttcagcaagagagtgatcctggctgacgcaaatctggataaagtcctgagcgcatacaacaagcaccgagacaaaccaatccgggagcaggccgaaaatatcattcatctgttcaccctgacaaacctgggcgcccctgcagccttcaagtattttgacaccacaatcgatcggaagagatacacttctaccaaagaggtgctggatgctaccctgatccaccagagtattaccggcctgtatgagacacgcatcgacctgtcacagctgggaggcgatgggagccccaagaaaaagcggaaggtgtctagttaa

SEQ ID NO: 17015-17016 - skipped (2 entries)

SEQ ID NO: 17017 - protein, 557 aa, Homo Sapiens; identical to SEQ ID NO: 6740

SEQ ID NO: 17018 - protein, 515 aa, Homo Sapiens [sequence omitted]

SEQ ID NO: 17019 - protein, 338 aa, Homo Sapiens
MVVMAPRTLFLLLSGALTLTETWAGSHSMRYFSAAVSRPGRGEPRFIAMGYVDDTQFVRFDSDSACPRMEPRAPWVEQEGPEYWEEETRNTKAHAQTDRMNLQTLRGYYNQSEASSHTLQWMIGCDLGSDGRLLRGYEQYAYDGKDYLALNEDLRSWTAADTAAQISKRKCEAANVAEQRRAYLEGTCVEWLHRYLENGKEMLQRADPPKTHVTHHPVFDYEATLRCWALGFYPAEIILTWQRDGEDQTQDVELVETRPAGDGTFQKWAAVVVPSGEEQRYTCHVQHEGLPEPLMLRWKQSSLPTIPIMGIVAGLVVLAAVVTGAAVAAVLWRKKSSD

SEQ ID NO: 17020 - protein, 246 aa, Homo Sapiens
MVVMAPRTLFLLLSGALTLTETWAGSHSMRYFSAAVSRPGRGEPRFIAMGYVDDTQFVRFDSDSACPRMEPRAPWVEQEGPEYWEEETRNTKAHAQTDRMNLQTLRGYYNQSEADPPKTHVTHHPVFDYEATLRCWALGFYPAEIILTWQRDGEDQTQDVELVETRPAGDGTFQKWAAVVVPSGEEQRYTCHVQHEGLPEPLMLRWKQSSLPTIPIMGIVAGLVVLAAVVTGAAVAAVLWRKKSSD

SEQ ID NO: 17021 - protein, 154 aa, Homo Sapiens
MVVMAPRTLFLLLSGALTLTETWAGSHSMRYFSAAVSRPGRGEPRFIAMGYVDDTQFVRFDSDSACPRMEPRAPWVEQEGPEYWEEETRNTKAHAQTDRMNLQTLRGYYNQSEAKQSSLPTIPIMGIVAGLVVLAAVVTGAAVAAVLWRKKSSD

SEQ ID NO: 17022 - protein, 246 aa, Homo Sapiens
MVVMAPRTLFLLLSGALTLTETWAGSHSMRYFSAAVSRPGRGEPRFIAMGYVDDTQFVRFDSDSACPRMEPRAPWVEQEGPEYWEEETRNTKAHAQTDRMNLQTLRGYYNQSEASSHTLQWMIGCDLGSDGRLLRGYEQYAYDGKDYLALNEDLRSWTAADTAAQISKRKCEAANVAEQRRAYLEGTCVEWLHRYLENGKEMLQRAKQSSLPTIPIMGIVAGLVVLAAVVTGAAVAAVLWRKKSSD

SEQ ID NO: 17023 - protein, 319 aa, Homo Sapiens
MVVMAPRTLFLLLSGALTLTETWAGSHSMRYFSAAVSRPGRGEPRFIAMGYVDDTQFVRFDSDSACPRMEPRAPWVEQEGPEYWEEETRNTKAHAQTDRMNLQTLRGYYNQSEASSHTLQWMIGCDLGSDGRLLRGYEQYAYDGKDYLALNEDLRSWTAADTAAQISKRKCEAANVAEQRRAYLEGTCVEWLHRYLENGKEMLQRADPPKTHVTHHPVFDYEATLRCWALGFYPAEIILTWQRDGEDQTQDVELVETRPAGDGTFQKWAAVVVPSGEEQRYTCHVQHEGLPEPLMLRWSKEGDGGIMSVRESRSLSEDL

SEQ ID NO: 17024 - protein, 227 aa, Homo Sapiens
MVVMAPRTLFLLLSGALTLTETWAGSHSMRYFSAAVSRPGRGEPRFIAMGYVDDTQFVRFDSDSACPRMEPRAPWVEQEGPEYWEEETRNTKAHAQTDRMNLQTLRGYYNQSEADPPKTHVTHHPVFDYEATLRCWALGFYPAEIILTWQRDGEDQTQDVELVETRPAGDGTFQKWAAVVVPSGEEQRYTCHVQHEGLPEPLMLRWSKEGDGGIMSVRESRSLSEDL

SEQ ID NO: 17025 - protein, 116 aa, Homo Sapiens
MVVMAPRTLFLLLSGALTLTETWAGSHSMRYFSAAVSRPGRGEPRFIAMGYVDDTQFVRFDSDSACPRMEPRAPWVEQEGPEYWEEETRNTKAHAQTDRMNLQTLRGYYNQSEASE

SEQ ID NO: 17026 - protein, 526 aa, Homo Sapiens
MGHLSAPLHRVRVPWQGLLLTASLLTFWNPPTTAQLTTESMPFNVAEGKEVLLLVHNLPQQLFGYSWYKGERVDGNRQIVGYAIGTQQATPGPANSGRETIYPNASLLIQNVTQNDTGFYTLQVIKSDLVNEEATGQFHVYPELPKPSISSNNSNPVEDKDAVAFTCEPETQDTTYLWWINNQSLPVSPRLQLSNGNRTLTLLSVTRNDTGPYECEIQNPVSANRSDPVTLNVTYGPDTPTISPSDTYYRPGANLSLSCYAASNPPAQYSWLINGTFQQSTQELFIPNITVNNSGSYTCHANNSVTGCNRTTVKTIIVTELSPVVAKPQIKASKTTVTGDKDSVNLTCSTNDTGISIRWFFKNQSLPSSERMKLSQGNTTLSINPVKREDAGTYWCEVFNPISKNQSDPIMLNVNYNALPQENGLSPGAIAGIVIGVVALVALIAVALACFLHFGKTGRASDQRDLTEHKPSVSNHTQDHSNDPPNKMNEVTYSTLNFEAQQPTQPTSASPSLTATEIIYSEVKKQ

SEQ ID NO: 17027 - protein, 565 aa, Influenza A
MKAKLLVLLCTFTATYADTICIGYHANNSTDTVDTVLEKNVTVTHSVNLLEDSHNGKLCLLKGIAPLQLGNCSVAGWILGNPECELLISKESWSYIVETPNPENGTCYPGYFADYEELREQLSSVSSFERFEIFPKESSWPNHTVTGVSASCSHNGKSSFYRNLLWLTGKNGLYPNLSKSYVNNKEKEVLVLWGVHHPPNIGNQRALYHTENAYVSVVSSHYSRRFTPEIAKRPKVRDQEGRINYYWTLLEPGDTIIFEANGNLIAPWYAFALSRGFGSGIITSNAPMDECDAKCQTPQGAINSSLPFQNVHPVTIGECPKYVRSAKLRMVTGLRNIPSIQSRGLFGAIAGFIEGGWTGMVDGWYGYHHQNEQGSGYAADQKSTQNAINGITNKVNSVIEKMNTQFTAVGKEFNKLERRMENLNKKVDDGFLDIWTYNAELLVLLENERTLDFHDSNVKNLYEKVKSQLKNNAKEIGNGCFEFYHKCNNECMESVKNGTYDYPKYSEESKLNREKIDGVKLESMGVYQILAIYSTVASSLVLLVSLGAISFWMCSNGSLQCRICI

SEQ ID NO: 17028 - protein, 243 aa, Homo Sapiens; identical to SEQ ID NO: 2367

SEQ ID NO: 17029 - protein, 382 aa, Homo Sapiens
MHDSNNVEKDITPSELPANPGCLHSKEHSIKATLIWRLFFLIMFLTIIVCGMVAALSAIRANCHQEPSVCLQAACPESWIGFQRKCFYFSDDTKNWTSSQRFCDSQDADLAQVESFQELNFLLRYKGPSDHWIGLSREQGQPWKWINGTEWTRQFPILGAGECAYLNDKGASSARHYTERKWICSKSDIHVMHDSNNVEKDITPSELPANPGCLHSKEHSIKATLIWRLFFLIMFLTIIVCGMVAALSAIRANCHQEPSVCLQAACPESWIGFQRKCFYFSDDTKNWTSSQRFCDSQDADLAQVESFQELNFLLRYKGPSDHWIGLSREQGQPWKWINGTEWTRQFPILGAGECAYLNDKGASSARHYTERKWICSKSDIHV

SEQ ID NO: 17030 - protein, 246 aa, Homo Sapiens
MAAAAATKILLCLPLLLLLSGWSRAGRADPHSLCYDITVIPKFRPGPRWCAVQGQVDEKTFLHYDCGNKTVTPVSPLGKKLNVTTAWKAQNPVLREVVDILTEQLRDIQLENYTPKEPLTLQARMSCEQKAEGHSSGSWQFSFDGQIFLLFDSEKRMWTTVHPGARKMKEKWENDKVVAMSFHYFSMGDCIGWLEDFLMGMDSTLEPSAGAPLAMSSGTTQLRATATTLILCCLLIILPCFILPGI

SEQ ID NO: 17031 - protein, 244 aa, Homo Sapiens; identical to SEQ ID NO: 13925

SEQ ID NO: 17032 - protein, 383 aa, Homo Sapiens
MGLGPVFLLLAGIFPFAPPGAAAEPHSLRYNLTVLSWDGSVQSGFLTEVHLDGQPFLRCDRQKCRAKPQGQWAEDVLGNKTWDRETRDLTGNGKDLRMTLAHIKDQKEGLHSLQEIRVCEIHEDNSTRSSQHFYYDGELFLSQNLETKEWTMPQSSRAQTLAMNVRNFLKEDAMKTKTHYHAMHADCLQELRRYLKSGVVLRRTVPPMVNVTRSEASEGNITVTCRASGFYPWNITLSWRQDGVSLSHDTQQWGDVLPDGNGTYQTWVATRICQGEEQRFTCYMEHSGNHSTHPVPSGKVLVLQSHWQTFHVSAVAAAAIFVIIIFYVRCCKKKTSAAEGPELVSLQVLDQHPVGTSDHRDATQLGFQPLMSDLGSTGSTEGA

SEQ ID NO: 17033 - protein, 383 aa, Homo Sapiens; identical to SEQ ID NO: 17032

SEQ ID NO: 17034 - protein, 294 aa, Artificial Sequence
  Synthetic Sequence
MGGVLLTQRTLLSLVLALLFPSMASMEPHSLRYNLTVLSWDGSVQSGFLTEVHLDGQPFLRCDRQKCRAKPQGQWAEDVLGNKTWDRETRDLTGNGKDLRMTLAHIKDQKEGLHSLQEIRVCEIHEDNSTRSSQHFYYDGELFLSQNLETKEWTMPQSSRAQTLTHYHAMHADCLQELRRYLKSGVVLRRTVPPMVNVTRSEASEGNITVTCRASGFYPWNITLSWRQDGVSLSHDTQQWGDVLPDGNGTYQTWVATRICQGEEQRFTCYMEHSGNHSTHPVPSGKVLVLQSHW

SEQ ID NO: 17035 - protein, 296 aa, Artificial Sequence
  Synthetic Sequence
MGGVLLTQRTLLSLVLALLFPSMASMEPHSLRYNLTVLSWDGSVQSGFLTEVHLDGQPFLRCDRQKCRAKPQGQWAEDVLGNKTWDRETRDLTGNGKLDLRMTLAHIKLDQKEGLHSLQEIRVCEIHEDNSTRSSQHFYYNGELFLSQNLETKEWTMPQSSRAQTLTHYHAMHADCLQELRRYLKSGVVLRRTVPPMVDVTRSEASEGNITVTCRASGFYPWNITLSWRQDGVSLSHDTQQWGDVLPDGNGTYQTWVATRICQGEEQRFTCYMEHSGNHSTHPVPSGKVLVLQSHW

SEQ ID NO: 17036 - DNA, 4897 bp, Artificial Sequence
  Synthetic Sequence
tgtacatagattaaccctagaaagataatcatattgtgacgtacgttaaagataatcatgcgtaaaattgacgcatgtgttttatcggtctgtatatcgaggtttatttattaatttgaatagatattaagttttattatatttacacttacatactaataataaattcaacaaacaatttatttatgtttatttatttattaaaaaaaaacaaaaactcaaaatttcttctataaagtaacaaaacttttatcgaatacctgcagcccgggggatgcagagggacagcccccccccaaagcccccagggatgtaattacgtccctcccccgctagggggcagcagcgagccgcccggggctccgctccggtccggcgctccccccgcatccccgagccggcagcgtgcggggacagcccgggcacggggaaggtggcacgggatcgctttcctctgaacgcttctcgctgctctttgagcctgcagacacctggggggatacggggaaaagttgactgtgcctttcgatcgaaccatggacagttagctttgcaaagatggataaagttttaaacagagaggaatctttgcagctaatggaccttctaggtcttgaaaggagtgggaattggctccggtgcccgtcagtgggcagagcgcacatcgcccacagtccccgagaagttggggggaggggtcggcaattgaaccggtgcctagagaaggtggcgcggggtaaactgggaaagtgatgtcgtgtactggctccgcctttttcccgagggtgggggagaaccgtatataagtgcagtagtcgccgtgaacgttctttttcgcaacgggtttgccgccagaacacaggtaagtgccgtgtgtggttcccgcgggcctggcctctttacgggttatggcccttgcgtgccttgaattacttccacctggctgcagtacgtgattcttgatcccgagcttcgggttggaagtgggtgggagagttcgaggccttgcgcttaaggagccccttcgcctcgtgcttgagttgaggcctggcctgggcgctggggccgccgcgtgcgaatctggtggcaccttcgcgcctgtctcgctgctttcgataagtctctagccatttaaaatttttgatgacctgctgcgacgctttttttctggcaagatagtcttgtaaatgcgggccaagatctgcacactggtatttcggtttttggggccgcgggcggcgacggggcccgtgcgtcccagcgcacatgttcggcgaggcggggcctgcgagcgcggccaccgagaatcggacgggggtagtctcaagctggccggcctgctctggtgcctggcctcgcgccgccgtgtatcgccccgccctgggcggcaaggctggcccggtcggcaccagttgcgtgagcggaaagatggccgcttcccggccctgctgcagggagctcaaaatggaggacgcggcgctcgggagagcgggcgggtgagtcacccacacaaaggaaaagggcctttccgtcctcagccgtcgcttcatgtgactccacggagtaccgggcgccgtccaggcacctcgattagttctcgagcttttggagtacgtcgtctttaggttggggggaggggttttatgcgatggagtttccccacactgagtgggtggagactgaagttaggccagcttggcacttgatgtaattctccttggaatttgccctttttgagtttggatcttggttcattctcaagcctcagacagtggttcaaagtttttttcttccatttcaggtgtcgtgagaattctaatacgactcactatagggtgtgctgtctcatcattttggcaaagattggccaccaagcttgtcctgcaggagggtcgacgcctctagacgggcggccgctccggatccacgggtaccgatcacatatgcctttaattaaacactagttctatagtgtcacctaaattccctttagtgagggttaatggccgtaggccgccagaattgggtccagacatgataagatacattgatgagtttggacaaaccacaactagaatgcagtgaaaaaaatgctttatttgtgaaatttgtgatgctattgctttatttgtaaccattataagctgcaataaacaagttaacaacaacaattgcattcattttatgtttcaggttcagggggaggtgtgggaggttttttcggactctaggacctgcgcatgcgcttggcgtaatcatggtcatagctgtttcctgttttccccgtatccccccaggtgtctgcaggctcaaagagcagcgagaagcgttcagaggaaagcgatcccgtgccaccttccccgtgcccgggctgtccccgcacgctgccggctcggggatgcggggggagcgccggaccggagcggagccccgggcggctcgctgctgccccctagcgggggagggacgtaattacatccctgggggctttgggggggggctgtccctctcaccgcggtggagctccagcttttgttcgaattggggccccccctcgagggtatcgatgatatctataacaagaaaatatatatataataagttatcacgtaagtagaacatgaaataacaatataattatcgtatgagttaaatcttaaaagtcacgtaaaagataatcatgcgtcattttgactcacgcggtcgttatagttcaaaatcagtgacacttaccgcattgacaagcacgcctcacgggagctccaagcggcgactgagatgtcctaaatgcacagcgacggattcgcgctatttagaaagagagagcaatatttcaagaatgcatgcgtcaattttacgcagactatctttctagggttaatctagctagccttaagggcgcctattgcgttgcgctcactgcccgctttccagtcgggaaacctgtcgtgccagctgcattaatgaatcggccaacgcgcggggagaggcggtttgcgtattgggcgctcttccgcttcctcgctcactgactcgctgcgctcggtcgttcggctgcggcgagcggtatcagctcactcaaaggcggtaatacggttatccacagaatcaggggataacgcaggaaagaacatgaccaaaatcccttaacgtgagttttcgttccactgagcgtcagaccccgtagaaaagatcaaaggatcttcttgagatcctttttttctgcgcgtaatctgctgcttgcaaacaaaaaaaccaccgctaccagcggtggtttgtttgccggatcaagagctaccaactctttttccgaaggtaactggcttcagcagagcgcagataccaaatactgttcttctagtgtagccgtagttaggccaccacttcaagaactctgtagcaccgcctacatacctcgctctgctaatcctgttaccagtggctgctgccagtggcgataagtcgtgtcttaccgggttggactcaagacgatagttaccggataaggcgcagcggtcgggctgaacggggggttcgtgcacacagcccagcttggagcgaacgacctacaccgaactgagatacctacagcgtgagctatgagaaagcgccacgcttcccgaagggagaaaggcggacaggtatccggtaagcggcagggtcggaacaggagagcgcacgagggagcttccagggggaaacgcctggtatctttatagtcctgtcgggtttcgccacctctgacttgagcgtcgatttttgtgatgctcgtcaggggggcggagcctatggaaaaacgccagcaacgcggcctttttacggttcctggccttttgctggccttttgctcacatgagattatcaaaaaggatcttcacctagatccttttaaattaaaaatgaagttttaaatcaatctaaagtatatatgagtaaacttggtctgacagtcagaagaactcgtcaagaaggcgatagaaggcgatgcgctgcgaatcgggagcggcgataccgtaaagcacgaggaagcggtcagcccattcgccgccaagctcttcagcaatatcacgggtagccaacgctatgtcctgatagcggtccgccacacccagccggccacagtcgatgaatccagaaaagcggccattttccaccatgatattcggcaagcaggcatcgccatgggtcacgacgagatcctcgccgtcgggcatgctcgccttgagcctggcgaacagttcggctggcgcgagcccctgatgctcttcgtccagatcatcctgatcgacaagaccggcttccatccgagtacgtgctcgctcgatgcgatgtttcgcttggtggtcgaatgggcaggtagccggatcaagcgtatgcagccgccgcattgcatcagccatgatggatactttctcggcaggagcaaggtgagatgacaggagatcctgccccggcacttcgcccaatagcagccagtcccttcccgcttcagtgacaacgtcgagcacagctgcgcaaggaacgcccgtcgtggccagccacgatagccgcgctgcctcgtcttgcagttcattcagggcaccggacaggtcggtcttgacaaaaagaaccgggcgcccctgcgctgacagccggaacacggcggcatcagagcagccgattgtctgttgtgcccagtcatagccgaatagcctctccacccaagcggccggagaacctgcgtgcaatccatcttgttcaatcataatattattgaagcatttatcagggttcgtctcgtcccggtctcctcccaatgcatgtcaatattggccattagccatattattcattggttatatagcataaatcaatattggctattggccattgcatacgttgtatctatatcataata

SEQ ID NO: 17037 - protein, 21 aa, Homo Sapiens
MALPVTALLLPLALLLHAARP

SEQ ID NO: 17038 - protein, 24 aa, Homo Sapiens
IYIWAPLAGTCGVLLLSLVITLYC

SEQ ID NO: 17039 - DNA, 63 bp, Homo Sapiens
atggcactgccagtcaccgccctgctgctgcctctggctctgctgctgcacgcagctagacca

SEQ ID NO: 17040 - DNA, 72 bp, Homo Sapiens
atctacatttgggcaccactggccgggacctgtggagtgctgctgctgagcctggtcatcacactgtactgc

SEQ ID NO: 17041-17046 - skipped (6 entries)

SEQ ID NO: 17047 - DNA, 135 bp, Homo Sapiens
accacaacccctgcccccagacctcccacacccgcccctaccatcgcgagtcagcccctgagtctgagacctgaggcctgcaggccagctgcaggaggagctgtgcacaccaggggcctggacttcgcctgcgac

SEQ ID NO: 17048-17050 - skipped (3 entries)

SEQ ID NO: 17051 - protein, 1053 aa, Staphylococcus aureus
MKRNYILGLDIGITSVGYGIIDYETRDVIDAGVRLFKEANVENNEGRRSKRGARRLKRRRRHRIQRVKKLLFDYNLLTDHSELSGINPYEARVKGLSQKLSEEEFSAALLHLAKRRGVHNVNEVEEDTGNELSTKEQISRNSKALEEKYVAELQLERLKKDGEVRGSINRFKTSDYVKEAKQLLKVQKAYHQLDQSFIDTYIDLLETRRTYYEGPGEGSPFGWKDIKEWYEMLMGHCTYFPEELRSVKYAYNADLYNALNDLNNLVITRDENEKLEYYEKFQIIENVFKQKKKPTLKQIAKEILVNEEDIKGYRVTSTGKPEFTNLKVYHDIKDITARKEIIENAELLDQIAKILTIYQSSEDIQEELTNLNSELTQEEIEQISNLKGYTGTHNLSLKAINLILDELWHTNDNQIAIFNRLKLVPKKVDLSQQKEIPTTLVDDFILSPVVKRSFIQSIKVINAIIKKYGLPNDIIIELAREKNSKDAQKMINEMQKRNRQTNERIEEIIRTTGKENAKYLIEKIKLHDMQEGKCLYSLEAIPLEDLLNNPFNYEVDHIIPRSVSFDNSFNNKVLVKQEENSKKGNRTPFQYLSSSDSKISYETFKKHILNLAKGKGRISKTKKEYLLEERDINRFSVQKDFINRNLVDTRYATRGLMNLLRSYFRVNNLDVKVKSINGGFTSFLRRKWKFKKERNKGYKHHAEDALIIANADFIFKEWKKLDKAKKVMENQMFEEKQAESMPEIETEQEYKEIFITPHQIKHIKDFKDYKYSHRVDKKPNRELINDTLYSTRKDDKGNTLIVNNLNGLYDKDNDKLKKLINKSPEKLLMYHHDPQTYQKLKLIMEQYGDEKNPLYKYYEETGNYLTKYSKKDNGPVIKKIKYYGNKLNAHLDITDDYPNSRNKVVKLSLKPYRFDVYLDNGVYKFVTVKNLDVIKKENYYEVNSKCYEEAKKLKKISNQAEFIASFYNNDLIKINGELYRVIGVNNDLLNRIEVNMIDITYREYLENMNDKRPPRIIKTIASKTQSIKKYSTDILGNLYEVKSKKHPQIIKKG

SEQ ID NO: 17052 - protein, 1053 aa, Artificial Sequence; identical to SEQ ID NO: 17008
  Synthetic Sequence

SEQ ID NO: 17053 - protein, 1368 aa, Artificial Sequence; identical to SEQ ID NO: 17009
  Synthetic Sequence
  misc_feature (1)..(1): Xaa can be any naturally occurring amino acid

SEQ ID NO: 17054 - protein, 1368 aa, Artificial Sequence
  Synthetic Sequence
MDKKYSIGLAIGTNSVGWAVITDEYKVPSKKFKVLGNTDRHSIKKNLIGALLFDSGETAEATRLKRTARRRYTRRKNRICYLQEIFSNEMAKVDDSFFHRLEESFLVEEDKKHERHPIFGNIVDEVAYHEKYPTIYHLRKKLVDSTDKADLRLIYLALAHMIKFRGHFLIEGDLNPDNSDVDKLFIQLVQTYNQLFEENPINASGVDAKAILSARLSKSRRLENLIAQLPGEKKNGLFGNLIALSLGLTPNFKSNFDLAEDAKLQLSKDTYDDDLDNLLAQIGDQYADLFLAAKNLSDAILLSDILRVNTEITKAPLSASMIKRYDEHHQDLTLLKALVRQQLPEKYKEIFFDQSKNGYAGYIDGGASQEEFYKFIKPILEKMDGTEELLVKLNREDLLRKQRTFDNGSIPHQIHLGELHAILRRQEDFYPFLKDNREKIEKILTFRIPYYVGPLARGNSRFAWMTRKSEETITPWNFEEVVDKGASAQSFIERMTNFDKNLPNEKVLPKHSLLYEYFTVYNELTKVKYVTEGMRKPAFLSGEQKKAIVDLLFKTNRKVTVKQLKEDYFKKIECFDSVEISGVEDRFNASLGTYHDLLKIIKDKDFLDNEENEDILEDIVLTLTLFEDREMIEERLKTYAHLFDDKVMKQLKRRRYTGWGRLSRKLINGIRDKQSGKTILDFLKSDGFANRNFMQLIHDDSLTFKEDIQKAQVSGQGDSLHEHIANLAGSPAIKKGILQTVKVVDELVKVMGRHKPENIVIEMARENQTTQKGQKNSRERMKRIEEGIKELGSQILKEHPVENTQLQNEKLYLYYLQNGRDMYVDQELDINRLSDYDVDAIVPQSFLKDDSIDNKVLTRSDKNRGKSDNVPSEEVVKKMKNYWRQLLNAKLITQRKFDNLTKAERGGLSELDKAGFIKRQLVETRQITKHVAQILDSRMNTKYDENDKLIREVKVITLKSKLVSDFRKDFQFYKVREINNYHHAHDAYLNAVVGTALIKKYPKLESEFVYGDYKVYDVRKMIAKSEQEIGKATAKYFFYSNIMNFFKTEITLANGEIRKRPLIETNGETGEIVWDKGRDFATVRKVLSMPQVNIVKKTEVQTGGFSKESILPKRNSDKLIARKKDWDPKKYGGFDSPTVAYSVLVVAKVEKGKSKKLKSVKELLGITIMERSSFEKNPIDFLEAKGYKEVKKDLIIKLPKYSLFELENGRKRMLASAGELQKGNELALPSKYVNFLYLASHYEKLKGSPEDNEQKQLFVEQHKHYLDEIIEQISEFSKRVILADANLDKVLSAYNKHRDKPIREQAENIIHLFTLTNLGAPAAFKYFDTTIDRKRYTSTKEVLDATLIHQSITGLYETRIDLSQLGGD

SEQ ID NO: 17055 - protein, 199 aa, Artificial Sequence; identical to SEQ ID NO: 17010
  Synthetic Sequence

SEQ ID NO: 17056 - protein, 1591 aa, Artificial Sequence; identical to SEQ ID NO: 17011
  Synthetic Sequence

SEQ ID NO: 17057 - DNA, 4776 bp, Artificial Sequence; identical to SEQ ID NO: 17014
  Synthetic Sequence

SEQ ID NO: 17058 - protein, 1588 aa, Artificial Sequence
  Synthetic Sequence
MPKKKRKVEGIKSNISLLKDELRGQISHISHEYLSLIDLAFDSKQNRLFEMKVLELLVNEYGFKGRHLGGSRKPDGIVYSTTLEDNFGIIVDTKAYSEGYSLPISQADEMERYVRENSNRDEEVNPNKWWENFSEEVKKYYFVFISGSFKGKFEEQLRRLSMTTGVNGSAVNVVNLLLGAEKIRSGEMTIEELERAMFNNSEFILKYGGGGSDKKYSIGLAIGTNSVGWAVITDEYKVPSKKFKVLGNTDRHSIKKNLIGALLFDSGETAEATRLKRTARRRYTRRKNRICYLQEIFSNEMAKVDDSFFHRLEESFLVEEDKKHERHPIFGNIVDEVAYHEKYPTIYHLRKKLVDSTDKADLRLIYLALAHMIKFRGHFLIEGDLNPDNSDVDKLFIQLVQTYNQLFEENPINASGVDAKAILSARLSKSRRLENLIAQLPGEKKNGLFGNLIALSLGLTPNFKSNFDLAEDAKLQLSKDTYDDDLDNLLAQIGDQYADLFLAAKNLSDAILLSDILRVNTEITKAPLSASMIKRYDEHHQDLTLLKALVRQQLPEKYKEIFFDQSKNGYAGYIDGGASQEEFYKFIKPILEKMDGTEELLVKLNREDLLRKQRTFDNGSIPHQIHLGELHAILRRQEDFYPFLKDNREKIEKILTFRIPYYVGPLARGNSRFAWMTRKSEETITPWNFEEVVDKGASAQSFIERMTNFDKNLPNEKVLPKHSLLYEYFTVYNELTKVKYVTEGMRKPAFLSGEQKKAIVDLLFKTNRKVTVKQLKEDYFKKIECFDSVEISGVEDRFNASLGTYHDLLKIIKDKDFLDNEENEDILEDIVLTLTLFEDREMIEERLKTYAHLFDDKVMKQLKRRRYTGWGRLSRKLINGIRDKQSGKTILDFLKSDGFANRNFMQLIHDDSLTFKEDIQKAQVSGQGDSLHEHIANLAGSPAIKKGILQTVKVVDELVKVMGRHKPENIVIEMARENQTTQKGQKNSRERMKRIEEGIKELGSQILKEHPVENTQLQNEKLYLYYLQNGRDMYVDQELDINRLSDYDVDAIVPQSFLKDDSIDNKVLTRSDKNRGKSDNVPSEEVVKKMKNYWRQLLNAKLITQRKFDNLTKAERGGLSELDKAGFIKRQLVETRQITKHVAQILDSRMNTKYDENDKLIREVKVITLKSKLVSDFRKDFQFYKVREINNYHHAHDAYLNAVVGTALIKKYPKLESEFVYGDYKVYDVRKMIAKSEQEIGKATAKYFFYSNIMNFFKTEITLANGEIRKRPLIETNGETGEIVWDKGRDFATVRKVLSMPQVNIVKKTEVQTGGFSKESILPKRNSDKLIARKKDWDPKKYGGFDSPTVAYSVLVVAKVEKGKSKKLKSVKELLGITIMERSSFEKNPIDFLEAKGYKEVKKDLIIKLPKYSLFELENGRKRMLASAGELQKGNELALPSKYVNFLYLASHYEKLKGSPEDNEQKQLFVEQHKHYLDEIIEQISEFSKRVILADANLDKVLSAYNKHRDKPIREQAENIIHLFTLTNLGAPAAFKYFDTTIDRKRYTSTKEVLDATLIHQSITGLYETRIDLSQLGGDGSPKKKRKV

SEQ ID NO: 17059 - DNA, 4767 bp, Artificial Sequence
  Synthetic Sequence
atgcctaagaagaagcggaaggtggaaggcatcaaaagcaacatctccctcctgaaagacgaactccgggggcagattagccacattagtcacgaatacctctccctcatcgacctggctttcgatagcaagcagaacaggctctttgagatgaaagtgctggaactgctcgtcaatgagtacgggttcaagggtcgacacctcggcggatctaggaaaccagacggcatcgtgtatagtaccacactggaagacaactttgggatcattgtggataccaaggcatactctgagggttatagtctgcccatttcacaggccgacgagatggaacggtacgtgcgcgagaactcaaatagagatgaggaagtcaaccctaacaagtggtgggagaacttctctgaggaagtgaagaaatactacttcgtctttatcagcgggtccttcaagggtaaatttgaggaacagctcaggagactgagcatgactaccggcgtgaatggcagcgccgtcaacgtggtcaatctgctcctgggcgctgaaaagattcggagcggagagatgaccatcgaagagctggagagggcaatgtttaataatagcgagtttatcctgaaatacggtggcggtggatccgataaaaagtattctattggtttagccatcggcactaattccgttggatgggctgtcataaccgatgaatacaaagtaccttcaaagaaatttaaggtgttggggaacacagaccgtcattcgattaaaaagaatcttatcggtgccctcctattcgatagtggcgaaacggcagaggcgactcgcctgaaacgaaccgctcggagaaggtatacacgtcgcaagaaccgaatatgttacttacaagaaatttttagcaatgagatggccaaagttgacgattctttctttcaccgtttggaagagtccttccttgtcgaagaggacaagaaacatgaacggcaccccatctttggaaacatagtagatgaggtggcatatcatgaaaagtacccaacgatttatcacctcagaaaaaagctagttgactcaactgataaagcggacctgaggttaatctacttggctcttgcccatatgataaagttccgtgggcactttctcattgagggtgatctaaatccggacaactcggatgtcgacaaactgttcatccagttagtacaaacctataatcagttgtttgaagagaaccctataaatgcaagtggcgtggatgcgaaggctattcttagcgcccgcctctctaaatcccgacggctagaaaacctgatcgcacaattacccggagagaagaaaaatgggttgttcggtaaccttatagcgctctcactaggcctgacaccaaattttaagtcgaacttcgacttagctgaagatgccaaattgcagcttagtaaggacacgtacgatgacgatctcgacaatctactggcacaaattggagatcagtatgcggacttatttttggctgccaaaaaccttagcgatgcaatcctcctatctgacatactgagagttaatactgagattaccaaggcgccgttatccgcttcaatgatcaaaaggtacgatgaacatcaccaagacttgacacttctcaaggccctagtccgtcagcaactgcctgagaaatataaggaaatattctttgatcagtcgaaaaacgggtacgcaggttatattgacggcggagcgagtcaagaggaattctacaagtttatcaaacccatattagagaagatggatgggacggaagagttgcttgtaaaactcaatcgcgaagatctactgcgaaagcagcggactttcgacaacggtagcattccacatcaaatccacttaggcgaattgcatgctatacttagaaggcaggaggatttttatccgttcctcaaagacaatcgtgaaaagattgagaaaatcctaacctttcgcataccttactatgtgggacccctggcccgagggaactctcggttcgcatggatgacaagaaagtccgaagaaacgattactccatggaattttgaggaagttgtcgataaaggtgcgtcagctcaatcgttcatcgagaggatgaccaactttgacaagaatttaccgaacgaaaaagtattgcctaagcacagtttactttacgagtatttcacagtgtacaatgaactcacgaaagttaagtatgtcactgagggcatgcgtaaacccgcctttctaagcggagaacagaagaaagcaatagtagatctgttattcaagaccaaccgcaaagtgacagttaagcaattgaaagaggactactttaagaaaattgaatgcttcgattctgtcgagatctccggggtagaagatcgatttaatgcgtcacttggtacgtatcatgacctcctaaagataattaaagataaggacttcctggataacgaagagaatgaagatatcttagaagatatagtgttgactcttaccctctttgaagatcgggaaatgattgaggaaagactaaaaacatacgctcacctgttcgacgataaggttatgaaacagttaaagaggcgtcgctatacgggctggggacgattgtcgcggaaacttatcaacgggataagagacaagcaaagtggtaaaactattctcgattttctaaagagcgacggcttcgccaataggaactttatgcagctgatccatgatgactctttaaccttcaaagaggatatacaaaaggcacaggtttccggacaaggggactcattgcacgaacatattgcgaatcttgctggttcgccagccatcaaaaagggcatactccagacagtcaaagtagtggatgagctagttaaggtcatgggacgtcacaaaccggaaaacattgtaatcgagatggcacgcgaaaatcaaacgactcagaaggggcaaaaaaacagtcgagagcggatgaagagaatagaagagggtattaaagaactgggcagccagatcttaaaggagcatcctgtggaaaatacccaattgcagaacgagaaactttacctctattacctacaaaatggaagggacatgtatgttgatcaggaactggacataaaccgtttatctgattacgacgtcgatgccattgtaccccaatcctttttgaaggacgattcaatcgacaataaagtgcttacacgctcggataagaaccgagggaaaagtgacaatgttccaagcgaggaagtcgtaaagaaaatgaagaactattggcggcagctcctaaatgcgaaactgataacgcaaagaaagttcgataacttaactaaagctgagaggggtggcttgtctgaacttgacaaggccggatttattaaacgtcagctcgtggaaacccgccaaatcacaaagcatgttgcacagatactagattcccgaatgaatacgaaatacgacgagaacgataagctgattcgggaagtcaaagtaatcactttaaagtcaaaattggtgtcggacttcagaaaggattttcaattctataaagttagggagataaataactaccaccatgcgcacgacgcttatcttaatgccgtcgtagggaccgcactcattaagaaatacccgaagctagaaagtgagtttgtgtatggtgattacaaagtttatgacgtccgtaagatgatcgcgaaaagcgaacaggagataggcaaggctacagccaaatacttcttttattctaacattatgaatttctttaagacggaaatcactctggcaaacggagagatacgcaaacgacctttaattgaaaccaatggggagacaggtgaaatcgtatgggataagggccgggacttcgcgacggtgagaaaagttttgtccatgccccaagtcaacatagtaaagaaaactgaggtgcagaccggagggttttcaaaggaatcgattcttccaaaaaggaatagtgataagctcatcgctcgtaaaaaggactgggacccgaaaaagtacggtggcttcgatagccctacagttgcctattctgtcctagtagtggcaaaagttgagaagggaaaatccaagaaactgaagtcagtcaaagaattattggggataacgattatggagcgctcgtcttttgaaaagaaccccatcgacttccttgaggcgaaaggttacaaggaagtaaaaaaggatctcataattaaactaccaaagtatagtctgtttgagttagaaaatggccgaaaacggatgttggctagcgccggagagcttcaaaaggggaacgaactcgcactaccgtctaaatacgtgaatttcctgtatttagcgtcccattacgagaagttgaaaggttcacctgaagataacgaacagaagcaactttttgttgagcagcacaaacattatctcgacgaaatcatagagcaaatttcggaattcagtaagagagtcatcctagctgatgccaatctggacaaagtattaagcgcatacaacaagcacagggataaacccatacgtgagcaggcggaaaatattatccatttgtttactcttaccaacctcggcgctccagccgcattcaagtattttgacacaacgatagatcgcaaacgatacacttctaccaaggaggtgctagacgcgacactgattcaccaatccatcacgggattatatgaaactcggatagatttgtcacagcttgggggtgacggatcccccaagaagaagaggaaagtctga

SEQ ID NO: 17060 - protein, 332 aa, Artificial Sequence
  Synthetic Sequence
MLRLLLALNLFPSIQVTGNKILVKQSPMLVAYDNAVNLSCKYSYNLFSREFRASLHKGLDSAVEVCVVYGNYSQQLQVYSKTGFNCDGKLGNESVTFYLQNLYVNQTDIYFCKIEVMYPPPYLDNEKSNGTIIHVKGKHLCPSPLFPGPSKPFWVLVVVGGVLACYSLLVTVAFIIFWVRSKRSRLLHSDYMNMTPRRPGPTRKHYQPYAPPRDFAAYRSRVKFSRSADAPAYKQGQNQLYNELNLGRREEYDVLDKRRGRDPEMGGKPRRKNPQEGLYNELQKDKMAEAYSEIGMKGERRRGKGHDGLYQGLSTATKDTYDALHMQALPPR

SEQ ID NO: 17061 - DNA, 996 bp, Artificial Sequence
  Synthetic Sequence
atgctgagactgctgctggccctgaatctgttccccagcatccaagtgaccggcaacaagatcctggtcaagcagagccctatgctggtggcctacgacaacgccgtgaacctgagctgcaagtacagctacaacctgttcagcagagagttccgggccagcctgcacaaaggactggattctgctgtggaagtgtgcgtggtgtacggcaactacagccagcagctgcaggtctacagcaagaccggcttcaactgcgacggcaagctgggcaatgagagcgtgaccttctacctgcaaaacctgtacgtgaaccagaccgacatctatttctgcaagatcgaagtgatgtacccgcctccttacctggacaacgagaagtccaacggcaccatcatccacgtgaagggcaagcacctgtgtccttctccactgttccccggacctagcaagcctttctgggtgctcgttgttgttggcggcgtgctggcctgttatagcctgctggttacagtggccttcatcatcttttgggtccgaagcaagcggagccggctgctgcacagcgactacatgaacatgacccctagacggcccggaccaaccagaaagcactaccagccttacgctcctcctagagacttcgccgcctaccggtccagagtgaagttctccagatccgccgatgctcccgcctataagcagggccagaaccagctgtacaacgagctgaacctggggagaagagaagagtacgatgtgctggacaagcggagaggcagagatcctgagatgggcggcaagcccagacggaagaatcctcaagagggcctgtacaatgaactgcagaaagacaagatggccgaggcctacagcgagatcggaatgaagggcgagcgcagaagaggcaagggacacgatggactgtaccagggcctgagcaccgccaccaaggatacctatgatgccctgcacatgcaggccctgcctccaaga

SEQ ID NO: 17062 - protein, 463 aa, Artificial Sequence
  Synthetic Sequence
MSFPCKFVASFLLIFNVSSKGAVSKEITNALETWGALGQDINLDIPSFQMSDDIDDIKWEKTSDKKKIAQFRKEKETFKEKDTYKLFKNGTLKIKHLKTDDQDIYKVSIYDTKGKNVLEKIFDLKIQERVSKPKISWTCINTTLTCEVMNGTDPELNLYQDGKHLKLSQRVITHKWTTSLSAKFKCTAGNKVSKESSVEPVSCPEKGLDIYLIIGICGGGSLLMVFVALLVFYITKRKKQRSRRNDEELETRAHRVATEERGRKPHQIPASTPQNPATSQHPPPPPGHRSQAPSHRPPPPGHRVQHQPQKRPPAPSGTQVHQQKGPPLPRPRVQPKPPHGAAENSLSPSSNRVKFSRSADAPAYKQGQNQLYNELNLGRREEYDVLDKRRGRDPEMGGKPRRKNPQEGLYNELQKDKMAEAYSEIGMKGERRRGKGHDGLYQGLSTATKDTYDALHMQALPPR

SEQ ID NO: 17063 - DNA, 1389 bp, Artificial Sequence
  Synthetic Sequence
atgagcttcccttgcaagttcgtggccagcttcctgctgatcttcaacgtgtcctctaagggcgccgtgtccaaagagatcacaaacgccctggaaacctggggagccctcggccaggatattaacctggacatccccagcttccagatgagcgacgacatcgatgacatcaagtgggagaaaaccagcgacaagaagaagatcgcccagttccggaaagagaaagagacattcaaagagaaggacacctacaagctgttcaagaacggcaccctgaagatcaagcacctgaaaaccgacgaccaggacatctataaggtgtccatctacgacaccaagggcaagaacgtgctggaaaagatcttcgacctcaagatccaagagcgggtgtccaagcctaagatcagctggacctgcatcaacaccacactgacctgcgaagtgatgaacggcacagaccccgagctgaacctgtaccaggatggcaaacacctgaagctgagccagcgcgtgatcacccacaagtggacaacaagcctgagcgccaagttcaagtgcaccgccggaaacaaagtgtctaaagagtccagcgtcgagcccgtgtcttgccctgaaaaaggactggacatctacctgatcatcggcatctgtggcggcggaagcctgctgatggtgtttgtggctctgctggtgttctacatcaccaagcggaagaagcagcggagcagacggaacgacgaggaactggaaacacgggcccatagagtggccaccgaggaaagaggcagaaagccccaccagattccagccagcacaccccagaatcctgccacctctcaacaccctccacctccacctggacacagatctcaggccccatctcacagacctccaccacctggtcatcgggtgcagcaccagcctcagaaaagacctcctgctcctagcggcacacaggtgcaccagcaaaaaggacctccactgcctcggcctagagtgcagcctaaacctcctcatggcgccgctgagaacagcctgtctccaagcagcaacagagtgaagttcagccgcagcgccgatgctcctgcctataagcagggacagaaccagctgtacaacgagctgaatctggggcgcagagaagagtacgatgtgctggacaagcggagaggcagagatcctgagatgggcggcaagcccagacggaagaatcctcaagagggcctgtataatgagctgcagaaagacaagatggccgaggcctacagcgagatcggaatgaagggcgagcgcagaagaggcaagggacacgatggactgtatcagggcctgagcaccgccaccaaggatacctatgatgccctgcacatgcaggccctgcctccaaga

SEQ ID NO: 17064 - protein, 499 aa, Artificial Sequence
  Synthetic Sequence
MSRSVALAVLALLSLSGLEAVMAPRTLILGGGGSGGGGSGGGGSIQRTPKIQVYSRHPAENGKSNFLNCYVSGFHPSDIEVDLLKNGERIEKVEHSDLSFSKDWSFYLLYYTEFTPTEKDEYACRVNHVTLSQPKIVKWDRDMGGGGSGGGGSGGGGSGGGGSGSHSLKYFHTSVSRPGRGEPRFISVGYVDDTQFVRFDNDAASPRMVPRAPWMEQEGSEYWDRETRSARDTAQIFRVNLRTLRGYYNQSEAGSHTLQWMHGCELGPDGRFLRGYEQFAYDGKDYLTLNEDLRSWTAVDTAAQISEQKSNDASEAEHQRAYLEDTCVEWLHKYLEKGKETLLHLEPPKTHVTHHPISDHEATLRCWALGFYPAEITLTWQQDGEGHTQDTELVETRPAGDGTFQKWAAVWPSGEEQRYTCHVQHEGLPEPVTLRWKPASQPTIPIVGIIAGLVLLGSVVSGAVVAAVIWRKKSSGGKGGSYSKAEWSDSAQGSESHSL

SEQ ID NO: 17065 - DNA, 1498 bp, Artificial Sequence
  Synthetic Sequence
atgtctcgcagcgtggccctggccgtgctggccctgctgtccctgtctggcctggaggccgtgatggccccccggaccctgatcctgggaggaggaggcagcggcggaggaggctccggaggcggcggctctatccagcgcacacctaagatccaggtgtattctcggcacccagccgagaacggcaagagcaacttcctgaattgctacgtgagcggctttcacccttccgacatcgaggtggatctgctgaagaatggcgagagaatcgagaaggtggagcactccgacctgagcttctccaaggattggtcatctgctgtactataccgagtttacccctacagagaaggacgagtacgcctgtcgcgtgaaccacgtgacactgtcccagccaaagatcgtgaagtgggaccgggatatgggcggcggcggctctggcggcggcggcagcggcggcggcggctccggaggaggcggctctggcagccactccctgaagtatttccacacctctgtgagccggccaggcagaggagagccacggttcatctctgtgggctacgtggacgatacacagttcgtgaggtttgacaatgatgccgccagcccaagaatggtgcctagggccccatggatggagcaggagggcagcgagtattgggacagggagacccggagcgccagagacacagcacagattttccgggtgaacctgagaaccctgaggggctactataatcagtccgaggccggctctcacacactccagtggatgcacggatgcgagctgggaccagatggccgcttcctgcggggctacgagcagtttgcctatgacggcaaggattacctgaccctgaacgaggacctgagatcctggaccgccgtggatacagccgcccagatcagcgagcagaagtccaatgacgcatctgaggcagagcaccagagggcatatctggaggatacctgcgtggagtggctgcacaagtacctggagaagggcaaggagacactgctgcacctggagccccctaagacccacgtgacacaccacccaatcagcgaccacgaggccaccctgaggtgttgggcactgggcttctatcccgccgagatcaccctgacatggcagcaggacggagagggacacacccaggatacagagctggtggagaccaggcccgccggcgatggcacatttcagaagtgggccgccgtggtggtgccttccggagaggagcagagatacacctgtcacgtgcagcacgagggactgccagagccagtgaccctgaggtggaagcctgccagccagcccacaatccctatcgtgggaatcatcgcaggcctggtgctgctgggctctgtggtgagcggagcagtggtggccgccgtgatctggcggaagaagagcagcggaggcaagggaggctcctactccaaggcagagtggagcgactccgcccagggctctgagagccactccctgtga

SEQ ID NO: 17066 - protein, 475 aa, Artificial Sequence
  Synthetic Sequence
MSRSVALAVLALLSLSGLEAIQRTPKIQVYSRHPAENGKSNFLNCYVSGFHPSDIEVDLLKNGERIEKVEHSDLSFSKDWSFYLLYYTEFTPTEKDEYACRVNHVTLSQPKIVKWDRDMGGGGSGGGGSGGGGSGGGGSGSHSLKYFHTSVSRPGRGEPRFISVGYVDDTQFVRFDNDAASPRMVPRAPWMEQEGSEYWDRETRSARDTAQIFRVNLRTLRGYYNQSEAGSHTLQWMHGCELGPDRRFLRGYEQFAYDGKDYLTLNEDLRSWTAVDTAAQISEQKSNDASEAEHQRAYLEDTCVEWLHKYLEKGKETLLHLEPPKTHVTHHPISDHEATLRCWALGFYPAEITLTWQQDGEGHTQDTELVETRPAGDGTFQKWAAVWPSGEEQRYTCHVQHEGLPEPVTLRWKPASQPTIPIVGIIAGLVLLGSVVSGAVVAAVIWRKKSSGGKGGSYYKAEWSDSAQGSESHSL

SEQ ID NO: 17067 - DNA, 1431 bp, Artificial Sequence
  Synthetic Sequence
atgagcagatctgtggccctggctgttctggctctgctgtctctgtctggcctggaagccatccagcggacccctaagatccaggtgtacagcagacaccccgccgagaacggcaagagcaacttcctgaactgctacgtgtccggctttcaccccagcgacattgaggtggacctgctgaagaacggcgagcggatcgagaaggtggaacacagcgatctgagcttcagcaaggactggtccttctacctgctgtactacaccgagttcacccctaccgagaaggacgagtacgcctgcagagtgaaccacgtgacactgagccagcctaagatcgtgaagtgggacagagatatgggcggaggcggatctggtggcggaggaagtggcggcggaggatctggcggtggtggttctggatctcacagcctgaagtactttcacacctccgtgtccagacctggcagaggcgagcctagattcatcagcgtgggctacgtggacgacacccagttcgtcagattcgacaacgacgccgcctctcctcggatggttcctagagcaccctggatggaacaagagggcagcgagtactgggatcgcgagacaagaagcgccagagacacagcccagatcttccgcgtgaacctgagaaccctgcggggctactacaatcagtctgaggccggctctcacaccctgcagtggatgcatggatgtgaactgggccccgacagacggttcctgagaggctatgagcagttcgcctacgacggcaaggactacctgacactgaacgaggacctgagaagctggaccgccgtggatacagccgctcagatcagcgagcagaagtctaacgacgccagcgaggccgaacaccagagagcctatctggaagatacctgcgtggaatggctgcacaagtacctggaaaagggcaaagagacactgctgcacctggaacctccaaagacacatgtgacccaccatcctatcagcgaccacgaggccacactgagatgttgggccctgggcttttaccctgccgagatcacactgacatggcagcaggatggcgagggccacacacaggatacagagctggtggaaacaagacctgccggcgacggcaccttccagaaatgggctgctgtggttgtgcccagcggcgaggaacagagatacacctgtcacgtgcagcacgagggactgcctgaacctgtgactctgagatggaagcctgccagccagccaacaatccccatcgtgggaatcattgccggcctggtgctgctgggatctgtggtttctggtgctgtggtggccgccgtgatttggagaaagaagtcctctggcggcaaaggcggctcctactataaggccgagtggagcgattctgcccagggctctgaaagccacagcctgtga

SEQ ID NO: 17068 - protein, 357 aa, Artificial Sequence
  Synthetic Sequence
MSRSVALAVLALLSLSGLEAGSHSLKYFHTSVSRPGRGEPRFISVGYVDDTQFVRFDNDAASPRMVPRAPWMEQEGSEYWDRETRSARDTAQIFRVNLRTLRGYYNQSEAGSHTLQWMHGCELGPDRRFLRGYEQFAYDGKDYLTLNEDLRSWTAVDTAAQISEQKSNDASEAEHQRAYLEDTCVEWLHKYLEKGKETLLHLEPPKTHVTHHPISDHEATLRCWALGFYPAEITLTWQQDGEGHTQDTELVETRPAGDGTFQKWAAVVVPSGEEQRYTCHVQHEGLPEPVTLRWKPASQPTIPIVGIIAGLVLLGSVVSGAVVAAVIWRKKSSGGKGGSYYKAEWSDSAQGSESHSL

SEQ ID NO: 17069 - DNA, 1056 bp, Artificial Sequence
  Synthetic Sequence
atgtctcgcagcgtggccctggccgtgctggccctgctgtccctgtctggcctggaggccggcagccactccctgaagtatttccacacctctgtgagccggccaggcagaggagagccacggttcatctctgtgggctacgtggacgatacacagttcgtgaggtttgacaatgatgccgccagcccaagaatggtgcctagggccccatggatggagcaggagggcagcgagtattgggacagggagacccggagcgccagagacacagcacagattttccgggtgaacctgagaaccctgaggggctactataatcagtccgaggccggctctcacacactccagtggatgcacggatgcgagctgggaccagatcgccgcttcctgcggggctacgagcagtttgcctatgacggcaaggattacctgaccctgaacgaggacctgagatcctggaccgccgtggatacagccgcccagatcagcgagcagaagtccaatgacgcatctgaggcagagcaccagagggcatatctggaggatacctgcgtggagtggctgcacaagtacctggagaagggcaaggagacactgctgcacctggagccccctaagacccacggacacaccacccaatcagcgaccacgaggccaccctgaggtgttgggcactgggcttctatcccgccgagatcaccctgacatggcagcaggacggagagggacacacccaggatacagagctggtggagaccaggcccgccggcgatggcacatttcagaagtgggccgccgtggggtgccttccggagaggagcagagatacacctgtcacgtgcagcacgagggactgccagagccagtgaccctgaggtggaagcctgccagccagcccacaatccctatcgtgggaatcatcgcaggcctggtgctgctgggctctgtggtgagcggagcagtggtggccgccgtgatctggcggaagaagagcagcggaggcaagggaggctcctactataaggcagagtggagcgactccgcccagggctctga

SEQ ID NO: 17070 - DNA, 23 bp, Artificial Sequence
  Synthetic Sequence
ggattacatcgccctgaacgagg

SEQ ID NO: 17071 - DNA, 23 bp, Artificial Sequence
  Synthetic Sequence
ctacctggagggcacgtgcgtgg

SEQ ID NO: 17072 - DNA, 23 bp, Artificial Sequence
  Synthetic Sequence
cacgcacgtgccctccaggtagg

SEQ ID NO: 17073 - DNA, 23 bp, Artificial Sequence
  Synthetic Sequence
ggagtggctccgcagatacctgg

SEQ ID NO: 17074 - DNA, 23 bp, Artificial Sequence
  Synthetic Sequence
tccgcagatacctggagaacggg

SEQ ID NO: 17075 - DNA, 23 bp, Artificial Sequence
  Synthetic Sequence
cagatacctggagaacgggaagg

SEQ ID NO: 17076 - DNA, 23 bp, Artificial Sequence
  Synthetic Sequence
ggattacatcgccctgaacgagg

SEQ ID NO: 17077 - DNA, 23 bp, Artificial Sequence
  Synthetic Sequence
tacctcatggagtgggagcctgg

SEQ ID NO: 17078 - DNA, 23 bp, Artificial Sequence
  Synthetic Sequence
ccccaggctcccactccatgagg

SEQ ID NO: 17079 - DNA, 23 bp, Artificial Sequence
  Synthetic Sequence
gcaggaggggccggagtattggg

SEQ ID NO: 17080 - DNA, 64 bp, Artificial Sequence
  Synthetic Sequence
gaaattaatacgactcactataggatacatcgccctgaacggttttagagctagaaatagcaag

SEQ ID NO: 17081 - DNA, 65 bp, Artificial Sequence
  Synthetic Sequence
gaaattaatacgactcactatagtacctggagggcacgtgcggttttagagctagaaatagcaag

SEQ ID NO: 17082 - DNA, 67 bp, Artificial Sequence
  Synthetic Sequence
gaaattaatacgactcactataggcacgcacgtgccctccaggtgttttagagctagaaatagcaag

SEQ ID NO: 17083 - DNA, 65 bp, Artificial Sequence
  Synthetic Sequence
gaaattaatacgactcactataggagtggctccgcagataccgttttagagctagaaatagcaag

SEQ ID NO: 17084 - DNA, 67 bp, Artificial Sequence
  Synthetic Sequence
gaaattaatacgactcactataggtccgcagatacctggagaacgttttagagctagaaatagcaag

SEQ ID NO: 17085 - DNA, 67 bp, Artificial Sequence
  Synthetic Sequence
gaaattaatacgactcactataggcagatacctggagaacgggagttttagagctagaaatagcaag

SEQ ID NO: 17086 - DNA, 65 bp, Artificial Sequence
  Synthetic Sequence
gaaattaatacgactcactataggattacatcgccctgaacggttttagagctagaaatagcaag

SEQ ID NO: 17087 - DNA, 67 bp, Artificial Sequence
  Synthetic Sequence
gaaattaatacgactcactataggtacctcatggagtgggagccgttttagagctagaaatagcaag

SEQ ID NO: 17088 - DNA, 67 bp, Artificial Sequence
  Synthetic Sequence
gaaattaatacgactcactataggccccaggctcccactccatggttttagagctagaaatagcaag

SEQ ID NO: 17089 - DNA, 66 bp, Artificial Sequence
  Synthetic Sequence
gaaattaatacgactcactataggcaggaggggccggagtattgttttagagctagaaatagcaag

SEQ ID NO: 17090 - protein, 636 aa, Tribolium castaneum
MMLNWLKSGKLESQSQEQSSCYLENSNCLPPTLDSTDIIGEENKAGTTSRKKRKYDEDYLNFGFTWTGDKDEPNGLCVICEQVVNNSSLNPAKLKRHLDTKHPTLKGKSEYFKRKCNELNQKKHTFERYVRDDNKNLLKASYLVSLRIAKQGEAYTIAEKLIKPCTKDLTTCVFGEKFASKVDLVPLSDTTISRRIEDMSYFCEAVLVNRLENAKCGFTLQMDESTDVAGLAILLVFVRYIHESSFEEDMLFCKALPTQTTGEEIFNLLNAYFEKHSIPWNLCYHICTDGAKAMVGVIKGVIARIKKLVPDIKASHCCLHRHALAVKRIPNALHEVLNDAVKMINFIKSRPLNARVFALLCDDLGSLHKNLLLHTEVRWLSRGKVLTRFWELRDEIRIFFNEREFAGKLNDTSWLQNLAYIADIFSYLNEVNLSLQGPNSTIFKVNSRINSIKSKLKLWEECITKNNTECFANLNDFLETSNTALDPNLKSNILEHLNGLKNTFLEYFPPTCNNISWVENPFNECGNVDTLPIKEREQLIDIRTDTTLKSSFVPDGIGPFWIKLMDEFPEISKRAVKELMPFVTTYLCEKSFSVYVATKTKYRNRLDAEDDMRLQLTTIHPDIDNLCNNKQAQKSH

SEQ ID NO: 17091 - DNA, 1911 bp, Tribolium castaneum
atgatgttgaattggctgaaaagtggaaagcttgaaagtcaatcacaggaacagagttcctgctaccttgagaactctaactgcctgccaccaacgctcgattctacagatattatcggtgaagagaacaaagctggtaccacctctcgcaagaagcggaaatatgacgaggactatctgaacttcggttttacatggactggcgacaaggatgagcccaacggactttgtgtgatttgcgagcaggtagtcaacaattcctcacttaacccggccaaactgaaacgccatttggacacaaagcatccgacgcttaaaggcaagagcgaatacttcaaaagaaaatgtaacgagctcaatcaaaagaagcatacttttgagcgatacgtaagggacgataacaagaacctcctgaaagcttcttatctcgtcagtttgagaatagctaaacagggcgaggcatataccatagcggagaagttgatcaagccttgcaccaaggatctgacaacttgcgtatttggagaaaaattcgcgagcaaagttgatctcgtccccctgtccgacacgactatttcaaggcgaatcgaagacatgagttacttctgtgaagccgtgctggtgaacaggttgaaaaatgctaaatgtgggtttacgctgcagatggacgagtcaacagatgttgccggtcttgcaatcctgcttgtgtttgttaggtacatacatgaaagctcttttgaggaggatatgttgttctgcaaagcacttcccactcagacgacaggggaggagattttcaatcttctcaatgcctatttcgaaaagcactccatcccatggaatctgtgttaccacatttgcacagacggtgccaaggcaatggtaggagttattaaaggagtcatagcgagaataaaaaaactcgtccctgatataaaagctagccactgttgcctgcatcgccacgctttggctgtaaagcgaataccgaatgcattgcacgaggtgctcaatgacgctgttaaaatgatcaacttcatcaagtctcggccgttgaatgcgcgcgtcttcgctttgctgtgtgacgatttggggagcctgcataaaaatcttcttcttcataccgaagtgaggtggctgtctagaggaaaggtgctgacccgattttgggaactgagagatgaaattagaattttcttcaacgaaagggaatttgccgggaaattgaacgacaccagttggttgcaaaatttggcatatatagctgacatattcagttatctgaatgaagttaatctttccctgcaagggccgaatagcacaatcttcaaggtaaatagccgcattaacagtattaaatcaaagttgaagttgtgggaagagtgtataacgaaaaataacactgagtgttttgcgaacctcaacgattttttggaaacttcaaacactgcgttggatccaaacctgaagtctaatattttggaacatctcaacggtcttaagaacacctttctggagtattttccacctacgtgtaataatatctcctgggtggagaatcctttcaatgaatgcggtaacgtcgatacactcccaataaaagagagggaacaattgattgacatacggactgatacgacattgaaatcttcattcgtgcctgatggtataggaccattctggatcaaactgatggacgaatttccagaaattagcaaacgagctgtcaaagagctcatgccatttgtaaccacttacctctgtgagaaatcattttccgtctatgtagccacaaaaacaaaatatcgaaatagacttgatgctgaagacgatatgcgactccaacttactactatccatccagacattgacaacctttgtaacaacaagcaggctcagaaatcccactga

SEQ ID NO: 17092 - DNA, 458 bp, Artificial Sequence
  Synthetic polynucleotide
cagtgttcttcaacctttgccatccggcggaaccctttgtcgagatatttttttttatggaacccttcatttagtaatacacccagatgagattttagggacagctgcgttgacttgttacgaacaaggtgagcccgtgctttggtctagccaagggcatggtaaagactatattcgcggcgttgtgacaatttaccgaacaactccgcggccgggaagccgatctcggcttgaacgaattgttaggtggcggtacttgggtcgatatcaaagtgcatcacttcttcccgtatgcccaactttgtatagagagccactgcgggatcgtcaccgtaatctgcttgcacgtagatcacataagcaccaagcgcgttggcctcatgcttgaggagattgatgagcgcggtggcaatgccctgcctccggtgctcgccggagactgcgagatcatagatata

SEQ ID NO: 17093 - DNA, 361 bp, Artificial Sequence
  Synthetic Polynucleotide
gatatcaagcttatcgataccgtcgacctcgagatttctgaacgattctaggttaggatcaaacaaaatacaatttattttaaaactgtaagttaacttacctttgcttgtctaaaccaaaaacaacaacaaaactacgaccacaagtacagttacatatttttgaaaattaaggttaagtgcagtgtaagtcaactatgcgaatggataacatgtttcaacatgaaactccgattgacgcatgtgcattctgaagagcggcgcggccgacgtctctcgaattgaagcaatgactcgcggaaccccgaaagcctttgggtggaaccctagggttccgcggaacacaggttgaagaacactg

SEQ ID NO: 17094 - DNA, 325 bp, Artificial Sequence
  Synthetic Polynucleotide
cctgcaggagtgttcttcaacctttgccatccggcggaaccctttgtcgagatatttttttttatggaacccttcatttagtaatacacccagatgagattttagggacagctgcgttgacttgttacgaacaaggtgagcccgtgctttggtaataaaaactctaaataagatttaaatttgcatttatttaaacaaactttaaacaaaaagataaatattccaaataaaataatatataaaataaaaaataaaaattaatgacttttttgcgcttgcttattattgcacaaattatcaatatcgggatggatcgttgtttttt

SEQ ID NO: 17095 - DNA, 346 bp, Artificial Sequence
  Synthetic Polynucleotide
gagccaattcagcatcatatttctgaacgattctaggttaggatcaaacaaaatacaatttattttaaaactgtaagttaacttacctttgcttgtctaaacctaaaacaacaacaaaactacgaccacaagtacagttacatatttttgaaaattaaggttaagtgcagtgtaagtcaactatgcgaatggataacatgtttcaacatgaaactccgattgacgcatgtgcattctgaagagcggcgcggccgacgtctctcgaattgaagcaatgactcgcggaaccccgaaagcctttgggtggaaccctagggttccgcggaacacaggttgaagaacactg

SEQ ID NO: 17096 - protein, 220 aa, Homo sapiens; identical to SEQ ID NO: 14678

SEQ ID NO: 17097 - DNA, 663 bp, Homo sapiens
atgctcaggctgctcttggctctcaacttattcccttcaattcaagtaacaggaaacaagattttggtgaagcagtcgcccatgcttgtagcgtacgacaatgcggtcaaccttagctgcaagtattcctacaatctcttctcaagggagttccgggcatcccttcacaaaggactggatagtgctgtggaagtctgtgttgtatatgggaattactcccagcagcttcaggtttactcaaaaacggggttcaactgtgatgggaaattgggcaatgaatcagtgacattctacctccagaatttgtatgttaaccaaacagatatttacttctgcaaaattgaagttatgtatcctcctccttacctagacaatgagaagagcaatggaaccattatccatgtgaaagggaaacacctttgtccaagtcccctatttcccggaccttctaagcccttttgggtgctggtggtggttggtggagtcctggcttgctatagcttgctagtaacagtggcctttattattttctgggtgaggagtaagaggagcaggctcctgcacagtgactacatgaacatgactccccgccgccccgggcccacccgcaagcattaccagccctatgccccaccacgcgacttcgcagcctatcgctcctga

SEQ ID NO: 17098 - protein, 18 aa, Artificial Sequence
  Synthetic Polypeptide
MLRLLLALNLFPSIQVTG

SEQ ID NO: 17099 - protein, 134 aa, Artificial Sequence
  Synthetic Polypeptide
NKILVKQSPMLVAYDNAVNLSCKYSYNLFSREFRASLHKGLDSAVEVCVVYGNYSQQLQVYSKTGFNCDGKLGNESVTFYLQNLYVNQTDIYFCKIEVMYPPPYLDNEKSNGTIIHVKGKHLCPSPLFPGPSKP

SEQ ID NO: 17100 - protein, 27 aa, Artificial Sequence
  Synthetic Polypeptide
FWVLVVVGGVLACYSLLVTVAFIIFWV

SEQ ID NO: 17101 - protein, 41 aa, Artificial Sequence
  Synthetic Polypeptide
RSKRSRLLHSDYMNMTPRRPGPTRKHYQPYAPPRDFAAYRS

SEQ ID NO: 17102 - protein, 112 aa, Artificial Sequence; identical to SEQ ID NO: 14477
  Synthetic Polypeptide

SEQ ID NO: 17103 - DNA, 54 bp, Artificial Sequence
  Synthetic Polynucleotide
atgctgagactgctgctggccctgaatctgttccccagcatccaagtgaccggc

SEQ ID NO: 17104 - DNA, 402 bp, Artificial Sequence
  Synthetic Polynucleotide
aacaagatcctggtcaagcagagccctatgctggtggcctacgacaacgccgtgaacctgagctgcaagtacagctacaacctgttcagcagagagttccgggccagcctgcacaaaggactggattctgctgtggaagtgtgcgtggtgtacggcaactacagccagcagctgcaggtctacagcaagaccggcttcaactgcgacggcaagctgggcaatgagagcgtgaccttctacctgcaaaacctgtacgtgaaccagaccgacatctatttctgcaagatcgaagtgatgtacccgcctccttacctggacaacgagaagtccaacggcaccatcatccacgtgaagggcaagcacctgtgtccttctccactgttccccggacctagcaagcct

SEQ ID NO: 17105 - DNA, 81 bp, Artificial Sequence
  Synthetic Polynucleotide
ttctgggtgctcgttgttgttggcggcgtgctggcctgttatagcctgctggttacagtggccttcatcatcttttgggtc

SEQ ID NO: 17106 - DNA, 123 bp, Artificial Sequence
  Synthetic Polynucleotide
cgaagcaagcggagccggctgctgcacagcgactacatgaacatgacccctagacggcccggaccaaccagaaagcactaccagccttacgctcctcctagagacttcgccgcctaccggtcc

SEQ ID NO: 17107 - DNA, 336 bp, Artificial Sequence
  Synthetic Polynucleotide
agagtgaagttctccagatccgccgatgctcccgcctataagcagggccagaaccagctgtacaacgagctgaacctggggagaagagaagagtacgatgtgctggacaagcggagaggcagagatcctgagatgggcggcaagcccagacggaagaatcctcaagagggcctgtacaatgaactgcagaaagacaagatggccgaggcctacagcgagatcggaatgaagggcgagcgcagaagaggcaagggacacgatggactgtaccagggcctgagcaccgccaccaaggatacctatgatgccctgcacatgcaggccctgcctccaaga

SEQ ID NO: 17108 - protein, 351 aa, Homo sapiens; identical to SEQ ID NO: 2244

SEQ ID NO: 17109 - DNA, 1056 bp, Homo sapiens
atgagctttccatgtaaatttgtagccagcttccttctgattttcaatgtttcttccaaaggtgcagtctccaaagagattacgaatgccttggaaacctggggtgccttgggtcaggacatcaacttggacattcctagttttcaaatgagtgatgatattgacgatataaaatgggaaaaaacttcagacaagaaaaagattgcacaattcagaaaagagaaagagactttcaaggaaaaagatacatataagctatttaaaaatggaactctgaaaattaagcatctgaagaccgatgatcaggatatctacaaggtatcaatatatgatacaaaaggaaaaaatgtgttggaaaaaatatttgatttgaagattcaagagagggtctcaaaaccaaagatctcctggacttgtatcaacacaaccctgacctgtgaggtaatgaatggaactgaccccgaattaaacctgtatcaagatgggaaacatctaaaactttctcagagggtcatcacacacaagtggaccaccagcctgagtgcaaaattcaagtgcacagcagggaacaaagtcagcaaggaatccagtgtcgagcctgtcagctgtccagagaaaggtctggacatctatctcatcattggcatatgtggaggaggcagcctcttgatggtctttgtggcactgctcgttttctatatcaccaaaaggaaaaaacagaggagtcggagaaatgatgaggagctggagacaagagcccacagagtagctactgaagaaaggggccggaagccccaccaaattccagcttcaacccctcagaatccagcaacttcccaacatcctcctccaccacctggtcatcgttcccaggcacctagtcatcgtcccccgcctcctggacaccgtgttcagcaccagcctcagaagaggcctcctgctccgtcgggcacacaagttcaccagcagaaaggcccgcccctccccagacctcgagttcagccaaaacctccccatggggcagcagaaaactcattgtccccttcctctaattaa

SEQ ID NO: 17110 - protein, 24 aa, Artificial Sequence
  Synthetic Polypeptide
MSFPCKFVASFLLIFNVSSKGAVS

SEQ ID NO: 17111 - protein, 185 aa, Artificial Sequence
  Synthetic Polypeptide
KEITNALETWGALGQDINLDIPSFQMSDDIDDIKWEKTSDKKKIAQFRKEKETFKEKDTYKLFKNGTLKIKHLKTDDQDIYKVSIYDTKGKNVLEKIFDLKIQERVSKPKISWTCINTTLTCEVMNGTDPELNLYQDGKHLKLSQRVITHKWTTSLSAKFKCTAGNKVSKESSVEPVSCPEKGLD

SEQ ID NO: 17112 - protein, 26 aa, Artificial Sequence
  Synthetic Polypeptide
IYLIIGICGGGSLLMVFVALLVFYIT

SEQ ID NO: 17113 - protein, 116 aa, Artificial Sequence
  Synthetic Polypeptide
KRKKQRSRRNDEELETRAHRVATEERGRKPHQIPASTPQNPATSQHPPPPPGHRSQAPSHRPPPPGHRVQHQPQKRPPAPSGTQVHQQKGPPLPRPRVQPKPPHGAAENSLSPSSN

SEQ ID NO: 17114 - DNA, 72 bp, Artificial Sequence
  Synthetic Polynucleotide
atgagcttcccttgcaagttcgtggccagcttcctgctgatcttcaacgtgtcctctaagggcgccgtgtcc

SEQ ID NO: 17115 - DNA, 555 bp, Artificial Sequence
  Synthetic Polynucleotide
aaagagatcacaaacgccctggaaacctggggagccctcggccaggatattaacctggacatccccagcttccagatgagcgacgacatcgatgacatcaagtgggagaaaaccagcgacaagaagaagatcgcccagttccggaaagagaaagagacattcaaagagaaggacacctacaagctgttcaagaacggcaccctgaagatcaagcacctgaaaaccgacgaccaggacatctataaggtgtccatctacgacaccaagggcaagaacgtgctggaaaagatcttcgacctcaagatccaagagcgggtgtccaagcctaagatcagctggacctgcatcaacaccacactgacctgcgaagtgatgaacggcacagaccccgagctgaacctgtaccaggatggcaaacacctgaagctgagccagcgcgtgatcacccacaagtggacaacaagcctgagcgccaagttcaagtgcaccgccggaaacaaagtgtctaaagagtccagcgtcgagcccgtgtcttgccctgaaaaaggactggac

SEQ ID NO: 17116 - DNA, 78 bp, Artificial Sequence
  Synthetic Polynucleotide
atctacctgatcatcggcatctgtggcggcggaagcctgctgatggtgtttgtggctctgctggtgttctacatcacc

SEQ ID NO: 17117 - DNA, 348 bp, Artificial Sequence
  Synthetic Polynucleotide
aagcggaagaagcagcggagcagacggaacgacgaggaactggaaacacgggcccatagagtggccaccgaggaaagaggcagaaagccccaccagattccagccagcacaccccagaatcctgccacctctcaacaccctccacctccacctggacacagatctcaggccccatctcacagacctccaccacctggtcatcgggtgcagcaccagcctcagaaaagacctcctgctcctagcggcacacaggtgcaccagcaaaaaggacctccactgcctcggcctagagtgcagcctaaacctcctcatggcgccgctgagaacagcctgtctccaagcagcaac

SEQ ID NO: 17118 - protein, 463 aa, Artificial Sequence
  Synthetic Polypeptide
MSFPCKFVASFLLIFNVSSKGAVSKEITNALETWGALGQDINLDIPSFQMSDDIDDIKWEKTSDKKKIAQFRKEKETFKEKDTYKLFKNGTLKIKHLKTDDQDIYKVSIYHTKGKNVLEKIFDLKIQERVSKPKISWTCINTTLTCEVMNGTDPELNLYQDGKHLKLSQRVITHKWTTSLSAKFKCTAGNKVSKESSVEPVSCPEKGLDIYLIIGICGGGSLLMVFVALLVFYITKRKKQRSRRNDEELETRAHRVATEERGRKPHQIPASTPQNPATSQHPPPPPGHRSQAPSHRPPPPGHRVQHQPQKRPPAPSGTQVHQQKGPPLPRPRVQPKPPHGAAENSLSPSSNRVKFSRSADAPAYKQGQNQLYNELNLGRREEYDVLDKRRGRDPEMGGKPRRKNPQEGLYNELQKDKMAEAYSEIGMKGERRRGKGHDGLYQGLSTATKDTYDALHMQALPPR

SEQ ID NO: 17119 - protein, 184 aa, Artificial Sequence
  Synthetic Polypeptide
KEITNALETWGALGQDINLDIPSFQMSDDIDDIKWEKTSDKKKIAQFRKEKETFKEKDTYKLFKNGTLKIKHLKTDDQDIYKVSIYHTKGKNVLEKIFDLKIQERVSKPKISWTCINTTLTCEVMNGTDPELNLYQDGKHLKLSQRVITHKWTTSLSAKFKCTAGNKVSKESSVEPVSCPEKGL

SEQ ID NO: 17120 - DNA, 1389 bp, Artificial Sequence
  Synthetic Polynucleotide
atgagcttcccttgcaagttcgtggccagcttcctgctgatcttcaacgtgtcctctaagggcgccgtgtccaaagagatcacaaacgccctggaaacctggggagccctcggccaggatattaacctggacatccccagcttccagatgagcgacgacatcgatgacatcaagtgggagaaaaccagcgacaagaagaagatcgcccagttccggaaagagaaagagacattcaaagagaaggacacctacaagctgttcaagaacggcaccctgaagatcaagcacctgaaaaccgacgaccaggacatctataaggtgtccatctaccacaccaagggcaagaacgtgctggaaaagatcttcgacctcaagatccaagagcgggtgtccaagcctaagatcagctggacctgcatcaacaccacactgacctgcgaagtgatgaacggcacagaccccgagctgaacctgtaccaggatggcaaacacctgaagctgagccagcgcgtgatcacccacaagtggacaacaagcctgagcgccaagttcaagtgcaccgccggaaacaaagtgtctaaagagtccagcgtcgagcccgtgtcttgccctgaaaaaggactggacatctacctgatcatcggcatctgtggcggcggaagcctgctgatggtgtttgtggctctgctggtgttctacatcaccaagcggaagaagcagcggagcagacggaacgacgaggaactggaaacacgggcccatagagtggccaccgaggaaagaggcagaaagccccaccagattccagccagcacaccccagaatcctgccacctctcaacaccctccacctccacctggacacagatctcaggccccatctcacagacctccaccacctggtcatcgggtgcagcaccagcctcagaaaagacctcctgctcctagcggcacacaggtgcaccagcaaaaaggacctccactgcctcggcctagagtgcagcctaaacctcctcatggcgccgctgagaacagcctgtctccaagcagcaacagagtgaagttcagccgcagcgccgatgctcctgcctataagcagggacagaaccagctgtacaacgagctgaatctggggcgcagagaagagtacgatgtgctggacaagcggagaggcagagatcctgagatgggcggcaagcccagacggaagaatcctcaagagggcctgtataatgagctgcagaaagacaagatggccgaggcctacagcgagatcggaatgaagggcgagcgcagaagaggcaagggacacgatggactgtatcagggcctgagcaccgccaccaaggatacctatgatgccctgcacatgcaggccctgcctccaaga

SEQ ID NO: 17121 - DNA, 555 bp, Artificial Sequence
  Synthetic Polynucleotide
aaagagatcacaaacgccctggaaacctggggagccctcggccaggatattaacctggacatccccagcttccagatgagcgacgacatcgatgacatcaagtgggagaaaaccagcgacaagaagaagatcgcccagttccggaaagagaaagagacattcaaagagaaggacacctacaagctgttcaagaacggcaccctgaagatcaagcacctgaaaaccgacgaccaggacatctataaggtgtccatctaccacaccaagggcaagaacgtgctggaaaagatcttcgacctcaagatccaagagcgggtgtccaagcctaagatcagctggacctgcatcaacaccacactgacctgcgaagtgatgaacggcacagaccccgagctgaacctgtaccaggatggcaaacacctgaagctgagccagcgcgtgatcacccacaagtggacaacaagcctgagcgccaagttcaagtgcaccgccggaaacaaagtgtctaaagagtccagcgtcgagcccgtgtcttgccctgaaaaaggactggac

SEQ ID NO: 17122 - protein, 357 aa, Homo sapiens
MVDGTLLLLLSEALALTQTWAGSHSLKYFHTSVSRPGRGEPRFISVGYVDDTQFVRFDNDAASPRMVPRAPWMEQEGSEYWDRETRSARDTAQIFRVNLRTLRGYYNQSEAGSHTLQWMHGCELGPDGRFLRGYEQFAYDGKDYLTLNEDLRSWTAVDTAAQISEQKSNDASEAEHQRAYLEDTCVEWLHKLEKGKETLLHLEPPKTHVTHHPISDHEATLRCWALGFYPAEITLTWQQDGEGHTQDTELVETRPAGDGTFQKWAAVVVPSGEEQRYTCHVQHEGLPEPVTLRWKPASQPTIPIVGIIAGLVLLGSVVSGAVVAAVIWRKKSSGGKGGSYSKAEWSDSAQGSESHSL

SEQ ID NO: 17123 - DNA, 1077 bp, Homo sapiens
atggtagatggaaccctccttttactcctctcggaggccctggcccttacccagacctgggcgggctcccactccttgaagtatttccacacttccgtgtcccggcccggccgcggggagccccgcttcatctctgtgggctacgtggacgacacccagttcgtgcgcttcgacaacgacgccgcgagtccgaggatggtgccgcgggcgccgtggatggagcaggaggggtcagagtattgggaccgggagacacggagcgccagggacaccgcacagattttccgagtgaatctgcggacgctgcgcggctactacaatcagagcgaggccgggtctcacaccctgcagtggatgcatggctgcgagctggggcccgacgggcgcttcctccgcgggtatgaacagttcgcctacgacggcaaggattatctcaccctgaatgaggacctgcgctcctggaccgcggtggacacggcggctcagatctccgagcaaaagtcaaatgatgcctctgaggcggagcaccagagagcctacctggaagacacatgcgtggagtggctccacaaatacctggagaaggggaaggagacgctgcttcacctggagcccccaaagacacacgtgactcaccaccccatctctgaccatgaggccaccctgaggtgctgggccctgggcttctaccctgcggagatcacactgacctggcagcaggatggggagggccatacccaggacacggagctcgtggagaccaggcctgcaggggatggaaccttccagaagtgggcagctgtggtggtgccttctggagaggagcagagatacacgtgccatgtgcagcatgaggggctacccgagcccgtcaccctgagatggaagccggcttcccagcccaccatccccatcgtgggcatcattgctggcctggttctccttggatctgtggtctctggagctgtggttgctgctgtgatatggaggaagaagagctcaggtggaaaaggagggagctactctaaggctgagtggagcgacagtgcccaggggtctgagtctcacagcttgtaa

SEQ ID NO: 17124 - protein, 119 aa, Homo sapiens; identical to SEQ ID NO: 1298

SEQ ID NO: 17125 - DNA, 360 bp, Homo sapiens
atgtctcgctccgtggccttagctgtgctcgcgctactctctctttctggcctggaggctatccagcgtactccaaagattcaggtttactcacgtcatccagcagagaatggaaagtcaaatttcctgaattgctatgtgtctgggtttcatccatccgacattgaagttgacttactgaagaatggagagagaattgaaaaagtggagcattcagacttgtctttcagcaaggactggtctttctatctcttgtactacactgaattcacccccactgaaaaagatgagtatgcctgccgtgtgaaccatgtgactttgtcacagcccaagatagttaagtgggatcgagacatgtaa

SEQ ID NO: 17126 - protein, 20 aa, Artificial Sequence
  Synthetic Polypeptide
MSRSVALAVLALLSLSGLEA

SEQ ID NO: 17127 - protein, 9 aa, Artificial Sequence
  Synthetic Polypeptide
VMAPRTLIL

SEQ ID NO: 17128 - protein, 15 aa, Artificial Sequence
  Synthetic Polypeptide
GGGGSGGGGSGGGGS

SEQ ID NO: 17129 - protein, 99 aa, Artificial Sequence [sequence omitted]

SEQ ID NO: 17130 - protein, 20 aa, Artificial Sequence
  Synthetic Polypeptide
GGGGSGGGGSGGGGSGGGGS

SEQ ID NO: 17131 - protein, 337 aa, Artificial Sequence
  Synthetic Polypeptide
GSHSLKYFHTSVSRPGRGEPRFISVGYVDDTQFVRFDNDAASPRMVPRAPWMEQEGSEYWDRETRSARDTAQIFRVNLRTLRGYYNQSEAGSHTLQWMHGCELGPDGRFLRGYEQFAYDGKDYLTLNEDLRSWTAVDTAAQISEQKSNDASEAEHQRAYLEDTCVEWLHKYLEKGKETLLHLEPPKTHVTHHPISDHEATLRCWALGFYPAEITLTWQQDGEGHTQDTELVETRPAGDGTFQKWAAVVVPSGEEQRYTCHVQHEGLPEPVTLRWKPASQPTIPIVGIIAGLVLLGSVVSGAVVAAVIWRKKSSGGKGGSYSKAEWSDSAQGSESHSL

SEQ ID NO: 17132 - DNA, 60 bp, Artificial Sequence
  Synthetic Polynucleotide
atgagcagatctgtggccctggctgttctggctctgctgtctctgtctggcctggaagcc

SEQ ID NO: 17133 - DNA, 27 bp, Artificial Sequence
  Synthetic Polynucleotide
gtgatggccccccggaccctgatcctg

SEQ ID NO: 17134 - DNA, 45 bp, Artificial Sequence
  Synthetic Polynucleotide
ggaggaggaggcagcggcggaggaggctccggaggcggcggctct

SEQ ID NO: 17135 - DNA, 297 bp, Artificial Sequence
  Synthetic Polynucleotide
atccagcgcacacctaagatccaggtgtattctcggcacccagccgagaacggcaagagcaacttcctgaattgctacgtgagcggctttcacccttccgacatcgaggtggatctgctgaagaatggcgagagaatcgagaaggtggagcactccgacctgagcttctccaaggattggtctttttatctgctgtactataccgagtttacccctacagagaaggacgagtacgcctgtcgcgtgaaccacgtgacactgtcccagccaaagatcgtgaagtgggaccgggatatg

SEQ ID NO: 17136 - DNA, 60 bp, Artificial Sequence
  Synthetic Polynucleotide
ggcggcggcggctctggcggcggcggcagcggcggcggcggctccggaggaggcggctct

SEQ ID NO: 17137 - DNA, 1014 bp, Artificial Sequence
  Synthetic Polynucleotide
ggcagccactccctgaagtatttccacacctctgtgagccggccaggcagaggagagccacggttcatctctgtgggctacgtggacgatacacagttcgtgaggtttgacaatgatgccgccagcccaagaatggtgcctagggccccatggatggagcaggagggcagcgagtattgggacagggagacccggagcgccagagacacagcacagattttccgggtgaacctgagaaccctgaggggctactataatcagtccgaggccggctctcacacactccagtggatgcacggatgcgagctgggaccagatggccgcttcctgcggggctacgagcagtttgcctatgacggcaaggattacctgaccctgaacgaggacctgagatcctggaccgccgtggatacagccgcccagatcagcgagcagaagtccaatgacgcatctgaggcagagcaccagagggcatatctggaggatacctgcgtggagtggctgcacaagtacctggagaagggcaaggagacactgctgcacctggagccccctaagacccacgtgacacaccacccaatcagcgaccacgaggccaccctgaggtgttgggcactgggcttctatcccgccgagatcaccctgacatggcagcaggacggagagggacacacccaggatacagagctggtggagaccaggcccgccggcgatggcacatttcagaagtgggccgccgtggtggtgccttccggagaggagcagagatacacctgtcacgtgcagcacgagggactgccagagccagtgaccctgaggtggaagcctgccagccagcccacaatccctatcgtgggaatcatcgcaggcctggtgctgctgggctctgtggtgagcggagcagtggtggccgccgtgatctggcggaagaagagcagcggaggcaagggaggctcctactccaaggcagagtggagcgactccgcccagggctctgagagccactccctgtga
